(19) United States
(12) Patent Application Publication
(10) Pub. No.: US 2014/0271549 A1
(43) Pub. Date: Sep. 18, 2014

(54) Use of Antibiotics to Enhance Treatment With Therapeutic Viruses

(71) Applicant: Aladar A. Szalay, Highland, CA (US)

(72) Inventor: Aladar A. Szalay, Highland, CA (US)

(21) Appl. No.: 13/999,616

(22) Filed: Mar. 11, 2014

Related U.S. Application Data
(60) Provisional application No. 61/852,133, filed on Mar. 15, 2013.

(51) Int. Cl. A61K 38/14; A61K 48/00; A61K 31/431; A61K 31/407; A61K 35/76; A61K 31/7036

(52) U.S. Cl. CPC A61K 38/14; A61K 35/768; A61K 31/7036; A61K 31/431; A61K 31/407; A61K 48/00
USPC 424/93.2

(57) ABSTRACT

Provided are methods for increasing the therapeutic efficacy of viral therapy by administering an antibiotic effective against commensal bacteria with the viral therapy. Included are methods for treating cancers, tumors and metastases by administering the virus and the antibiotic.

### RELATED APPLICATIONS

[0001] Benefit of priority is claimed to U.S. Provisional Application Ser. No. 61/852,133, filed Mar. 15, 2013, to Aladar A. Szalay, entitled “USE OF ANTIBIOTICS TO ENHANCE TREATMENT WITH THERAPEUTIC VIRUSES.” The subject matter of this application is incorporated by reference in its entirety.

### INCORPORATION BY REFERENCE OF SEQUENCE LISTING PROVIDED ON COMPACT DISCS

[0002] An electronic version on compact disc (CD-R) of the Sequence Listing is filed herewith in duplicate (labeled Copy 1 and Copy 2), the contents of which are incorporated by reference in their entirety. The computer-readable file on each of the aforementioned compact discs, created on Mar. 10, 2014, is identical, 5.27 MB in size, and titled 4826SEQ.001.txt.

### FIELD OF INVENTION

[0003] Provided are methods of increasing the therapeutic efficacy of viral therapy, such as oncolytic viral therapy and gene therapy by administration of an antibiotics, and methods of combination therapy in which antibiotics that inhibit gut bacteria are administered with therapeutic viruses. Combinations and kits for practicing the methods also are provided.

### BACKGROUND

[0004] Biological therapies, such as gene therapies, cell therapies and oncolytic viral therapies are viable treatment modalities. Treatment of cancers and other disorders with therapeutic viruses is an important therapeutic regimens. Increasing the effectiveness of such therapies would be advantageous. This and other needs are addressed herein.

### SUMMARY

[0005] Provided are methods for enhancing the effectiveness of a therapeutic virus by administering an antibiotic with, before, after or during treatment with the therapeutic virus. Corresponding methods of treatment also are provided.

[0006] The antibiotic is one that inhibits the growth of or kills commensal gut bacteria and thereby reduces the number of gut bacteria and is not an anti-cancer antibiotic. Administration of such antibiotics can be employed with any type of viral therapy, including, for example viral therapy to provide gene therapy and/or to treat cancers and tumors. Included among the methods are methods for treating cancers, tumors and/or metastases by administering a therapeutic virus for treatment of cancers, tumors or metastases; and administering an antibiotic that is effective against commensal gut bacteria, wherein the oncolytic therapeutic virus is effective for treating tumors. Also provided are compositions for use for increasing the effectiveness of therapeutic viral therapy for the treatment of tumors. The compositions contain an antibiotic that inhibits the growth of or kills commensal gut bacteria to thereby reduce the number of gut bacteria and is not an anti-cancer antibiotic.

[0007] For the methods and compositions for use, the therapeutic virus includes, for example viruses selected from among a retrovirus, adenovirus, lentivirus, herpes simplex virus, poxvirus and adeno-associated virus (AAV). The therapeutic viruses can be oncolytic viruses, such as, but not limited to Newcastle Disease virus, parvovirus, pox virus, such as vaccinia virus, measles virus, reovirus, vesicular stomatitis virus (VSV), oncolytic adenovirus, poliovirus, herpes virus and derivative and modified forms thereof. Exemplary vaccinia viruses include strains designated Western Reserve (WR), Copenhagen, Tashkent, Tian Tan, Lister, Wyeth, such as the viruses designated JX-294 or JX-594, IHD-J, and IHD-W, Brighton, Ankara, MVA, Dairen I, LIVP, LC16M8, LC16MO, LIVP and WR 65-16. All of the viruses can be modified to include and encode a therapeutic product and or a diagnostic or detectable product. Viruses, such as adenoviruses, that are not inherently oncolytic, can be modified to be oncolytic. Such viruses are well known in the art.

[0008] Vaccinia viruses include Lister strain vaccinia viruses, such as the LIVP strain virus. Exemplary of such viruses is the virus designated GLV-1h68 and derivatives and modified forms thereof, as well as clonal strains of an LIVP virus and a modified forms thereof containing nucleic acid encoding a heterologous gene product.

[0009] The genome of the LIVP virus and modified forms thereof can include a sequence of nucleotides set forth in SEQ ID NO:2, or a sequence of nucleotides that has at least 95% sequence identity to SEQ ID NO:2; or virus comprises a sequence of nucleotides set forth in any of SEQ ID NOS: 3-9, or a sequence of nucleotides that has at least 97% sequence identity to a sequence of nucleotides set forth in any of SEQ ID NOS: 3-9, or a sequence of nucleotides selected from among any of SEQ ID NOS:1 and 10-19, or a sequence of nucleotides that exhibits at least 99% sequence identity to any of SEQ ID NOS: 1 and 10-19.

[0010] Also exemplary of the viruses are clonal strains of LIVP, such as the viruses whose genomes contain a sequence of nucleotides selected from: a) nucleotides 2,256-180,095 of SEQ ID NO:3, nucleotides 11,243-182,721 of SEQ ID NO:4, nucleotides 6,264-181,390 of SEQ ID NO:5, nucleotides 7,044-181,820 of SEQ ID NO:6, nucleotides 6,674-181,409 of SEQ ID NO:7, nucleotides 6,716-181,367 of SEQ ID NO:8 or nucleotides 6,899-181,870 of SEQ ID NO:9; b) a sequence of nucleotides that has at least 97% sequence identity to a sequence of nucleotides 2,256-180,095 of SEQ ID NO:3, nucleotides 11,243-182,721 of SEQ ID NO:4, nucleotides 6,264-181,390 of SEQ ID NO:5, nucleotides 7,044-181,820 of SEQ ID NO:6, nucleotides 6,674-181,409 of SEQ ID NO:7, nucleotides 6,716-181,367 of SEQ ID NO:8 or nucleotides 6,899-181,870 of SEQ ID NO:9

[0011] Also contemplated are modified forms of any of the therapeutic viruses that include heterologous nucleic acid encoding therapeutic and/or diagnostic products as required. The nucleic acid encoding the heterologous gene product can be inserted into or in place of a non-essential gene or region in the genome of the virus. For example, the nucleic acid encoding the heterologous gene product is inserted into a vaccinia virus, such as LIVP, at the hemagglutinin (HA), thymidine kinase (TK), F14.5L, vaccinia growth factor (VGF), A35R, N1L, E2L/E3L, K1L/K2L, superoxide dismutase locus, 7.5K, C7-K1L, B13R+B14R, A26L or 14L gene loci in the genome of the virus.

[0012] Heterologous products include therapeutic proteins and diagnostic products, such as detectable products and products that produce a detectable signal, such as reporter gene products, such as a fluorescent protein, a bioluminescent protein, a receptor and an enzyme. For example, the fluorescent protein can be selected from among a green fluorescent protein, an enhanced green fluorescent protein, a blue fluorescent protein, a cyan fluorescent protein, a yellow fluorescent protein, a red fluorescent protein and a far-red fluorescent protein, such as the protein designated TurboFP635. Enzymes include, for example, a luciferase, β-glucuronidase, β-galactosidase, chloramphenicol acetyl tranferase (CAT), alkaline phosphatase, and horseradish peroxidase. Enzymes include, but are not limited to, enzymes that modify a substrate to produce a detectable product or signal or are detectable by antibodies, proteins that can bind a contrasting agent, genes for optical imaging or detection, genes for PET imaging and genes for MRI imaging. Receptors include those that bind to a detectable moiety or a ligand attached to a detectable moiety, including, but not limited to a radiolabel, a chromogen, or a fluorescent moiety. Therapeutic products can be selected from among, for example, an anticancer agent, an antimetastatic agent, an antiangiogenic agent, an immunomodulatory molecule, an antigen, a cell matrix degradative gene, genes for tissue regeneration and reprogramming human somatic cells to pluripotency.

[0013] The antibiotic is administered and/in the compositions in an amount that reduces or eliminates commensal gut bacteria or provided. The single dosage or daily dosage of antibiotic depends upon the particular antibiotic, but such dosages are well known. Exemplary single and daily dosages include, for example, an amount between at or about at least 1 mg and at or about at least 10 g; or between at or about at least 1 mg and at or about at least 1000 mg; or between at or about at 500 mg and at or about at least 5 g; or is or is at least about 1, 2, 3, 4, 5, 6, 7, 8, 9, 10, 15, 20, 25, 30, 35, 40, 45, 50, 55, 60, 65, 70, 75, 80, 85, 90, 95, 100, 125, 150, 175, 200, 225, 250, 275, 300, 325, 350, 375, 400, 425, 450, 475, 500, 525, 550, 575, 600, 625, 650, 675, 700, 725, 750, 775, 800, 825, 850, 875, 900, 925, 950, 975 or 1000 mg, 1.5, 2, 2.5, 3, 3.5, 4, 4.5, or 5 g.

[0014] For the methods, the antibiotic can be administered prior to, with, after, during or intermittently with virus. It can be administered once or a plurality of times. It can be administered with each viral therapy cycle or at other intervals. For example, the antibiotic can be administered at least, at about or at 1, 2, 3, 4, 5, 6, 7, 8, 9, 10, 11, 12, 13, 14, 15, 16, 17, 18, 19, 20, 21, 22, 23, 24, 36 or 48 or more hours prior to administration of the virus. When administered after administration of the virus, the antibiotic can be administered, for example, at about or at ¼, ½, 1, 2, 3, 4, 5, 6, 7, 8, 9, 10, 11, 12, 13, 14, 15, 16, 17, 18, 19, 20, 21, 22, 23, 24 or more hours, 2, 3, 4, 5, 6, 7, 8, 9, 10, 11, 12, 13, 14 or more days after administration of the virus.

[0015] Exemplary antibiotics for use in the methods and in the compositions include any antibiotic that reduces the number or amount of commensal gut bacteria. These include, but are not limited to, penicillins, penicillin combinations, cephalosporins, tetracyclines, β-lactam antibiotics, carbacephems, glycopeptides, aminoglycosides, ansamycins, macrolides, monobactams, nitrofurans, sulfonamides, lincosamides, lipopeptides, polypeptides, quinolones, drugs against mycobacteria, oxazolidinones, arsphenamine, chloramphenicol, fosfomycin, fusidic acid, metronidazole, tazobactam, mupirocin, platensimycin, quinupristin/dalfopristin, thiamphenicol, tigecycline, tinidazole and trimethoprim and mixtures thereof. The antibiotic can be selected from among penicillin, benzylpenicillin (penicillin G), procaine benzylpenicillin (procaine penicillin), benzathine benzylpenicillin (benzathine penicillin), phenoxymethylpenicillin (penicillin V), amoxicillin, ampicillin, azlocillin, carbenicillin, cloxacillin, dicloxacillin, flucloxacillin, mezlocillin, methicillin, nafcillin, oxacillin, temocillin, ticarcillin, amoxicillin/clavulanate, ampicillin/sulbactam, piperacillin/tazobactam, ticarcillin/clavulanate, demeclocycline, doxycycline, minocycline, oxytetracycline, tetracycline, cefacetrile, cefadroxil, cephalexin, cefaloglycin, cefalonium, cefaloridine, cefalotin, cefapirin, cefatrizine, cefazaflur, cefazedone, cefazolin, cefradine, cefroxadine, ceftezole, cefaclor, cefonicid, cefprozil, cefuroxime, cefuzonam, cefmetazole, cefotetan, cefoxitin, loracarbef, cefbuperazone, cefmetazole, cefminox, cefotetan, cefoxitin, cefotiam, cefcapene, cefdaloxime, cefdinir, cefditoren, cefetamet, cefixime, cefmenoxime, cefodizime, cefotaxime, cefovecin, cefpimizole, cefpodoxime, cefteram, ceftibuten, ceftiofur, ceftiolene, ceftizoxime, ceftriaxone, cefoperazone, ceftazidime, latamoxef, cefclidine, cefepime, cefluprenam, cefoselis, cefozopran, cefpirome, cefquinome, flomoxef, ceftobiprole, ceftaroline, cefaloram, cefaparole, cefcanel, cefedrolor, cefempidone, cefetrizole, cefivitril, cefmepidium, cefoxazole, cefrotil, cefsumide, ceftioxide, cefuracetime, ertapenem, doripenem, imipenem, imipenem/cilastatin, meropenem, panipenem/betamipron, biapenem, razupenem, tebipenem, loracarbef, teicoplanin, vancomycin, bleomycin, ramoplanin, decaplanin, telavancin, streptomycin, gentamicin, kanamycin, neomycin, netilmicin, tobramycin, spectinomycin, paromomycin, framycetin, ribostamycin, amikacin, arbekacin, bekanamycin, dibekacin, rhodostreptomycin, apramycin, hygromycin B, paromomycin sulfate, sisomicin, isepamicin, verdamicin, astromicin, geldanamycin, herbimycin, rifaximin, azithromycin, clarithromycin, dirithromycin, erythromycin, roxithromycin, telithromycin, carbomycin A, josamycin, kitasamycin, midecamycin, midecamycin acetate, oleandomycin, solithromycin, spiramycin, troleandomycin, tylosin, tylocine, ketolides such as telithromycin, cethromycin, solithromycin, spiramycin, ansamycin, oleandomycin, carbomycin, tylosin, aztreonam, furazolidone, nitrofurantoin, mafenide, sulfamethoxazole, sulfisomidine, sulfadiazine, silver sulfadiazine, sulfamethoxine, sulfamethizole, sulfanilamide, sulfasalazine, sulfisoxazole, trimethoprim-sulfamethoxazole, sulfonamidochrysoidine, sulfacetamide, sulfadoxine, dichlorphenamide, clindamycin, lincomycin, daptomycin, bacitracin, colistin, polymyxin B, moxifloxacin, ciprofloxacin, levofloxacin, cinoxacin, nalidixic acid, oxolinic acid, piromidic acid, pipemidic acid, rosoxacin, enoxacin, fleroxacin, lomefloxacin, nadifloxacin, norfloxacin, ofloxacin, pefloxacin, rufloxacin, balofloxacin, grepafloxacin, pazufloxacin, sparfloxacin, tosufloxacin, clinafloxacin, gatifloxacin, gemifloxacin, moxifloxacin, sitafloxacin, trovafloxacin, prulifloxacin, clofazimine, dapsone, capreomycin, cycloserine, ethambutol, ethionamide, isoniazid, pyrazinamide, rifampicin, rifabutin, rifapentine, streptomycin, linezolid, posizolid, radezolid, cycloserine, torezolid, arsphenamine, chloramphenicol, fosfomycin, fusidic acid, metronidazole, tazobactam, mupirocin, platensimycin, quinupristin/dalfopristin, thiamphenicol, tigecycline, tinidazole and trimethoprim and mixtures of any of the antibiotics. Particular antibiotics include penicillin, streptomycin, ampicillin, neomycin, metronidazole, vancomycin, tazobactam, meropenem, a mixture of penicillin and streptomycin, a mixture of ampicillin, neomycin, metronidazole and vancomycin, and a mixture of tazobactam, meropenem and vancomycin.

[0016] An antimycotic can be administered with the antibiotic or before or after the antibiotic or with the virus or before or after the virus. The antimycotic can be included in the compositions. Exemplary antimycotics include, but are not limited to, amphotericin B, candicidin, filipin, hamycin, natamycin, nystatin, rimocidin, imidazole antifungals, bifonazole, butoconazole, clotrimazole, econazole, fenticonazole, isoconazole, ketoconazole, miconazole, omoconazole, oxiconazole, sertaconazole, sulconazole, tioconazole, albaconazole, fluconazole, isavuconazole, itraconazole, posaconazole, ravuconazole, terconazole, voriconazole, abafungin, amorolfine, butenafine, naftifine, terbinafine, anidulafungin, caspofungin, micafungin, ciclopirox, flucytosine, 5-fluorocytosine, griseofulvin, haloprogin, polygodial, tolnaftate, undecylenic acid and crystal violet. The antimycotic can be administered as part of the methods for enhancing the viral therapy, and also to control and fungal infections consequent to antibiotic administration.

[0017] Viral dosages depend upon the virus, the regimen, the indication and also the subject and, if necessary can be empirically determined. Exemplary dosages include, for example, 1×10⁶ pfu to 1×10¹⁴ pfu, or an amount that is at least or at least about or is or is about 1×10⁶ pfu, 1×10⁷ pfu or 1×10⁸ pfu, 1×10⁹ pfu, 3×10⁹ pfu, 1×10¹⁰ pfu, 1×10¹¹ pfu, 1×10¹² pfu, 1×10¹³ pfu, or 1×10¹⁴ pfu.

[0018] Diseases and conditions whose treatment with viral therapy that is enhanced, includes any disease or condition treated by viral therapy, including tumors, cancers and metastases. These include solid tumors and disseminated tumors, CTCs, blood and cancers of other body fluids, such as leptomeningeal metastases (LM), which result from the spread of metastatic tumor cells to the cerebrospinal fluid (CSF) and leptomeninges, and of peritoneal carcinomatosis. Cancers and tumor include, for example, acute lymphoblastic leukemia, acute lymphoblastic leukemia, acute myeloid leukemia, acute promyelocytic leukemia, adenocarcinoma, adenoma, adrenal cancer, adrenocortical carcinoma, AIDS-related cancer, AIDS-related lymphoma, anal cancer, appendix cancer, astrocytoma, basal cell carcinoma, bile duct cancer, bladder cancer, bone cancer, osteosarcoma/malignant fibrous histiocytoma, brainstem glioma, brain cancer, carcinoma, cerebellar astrocytoma, cerebral astrocytoma/malignant glioma, ependymoma, medulloblastoma, supratentorial primitive neuroectodermal tumor, visual pathway or hypothalamic glioma, breast cancer, bronchial adenoma/carcinoid, Burkitt lymphoma, carcinoid tumor, carcinoma, central nervous system lymphoma, cervical cancer, chronic lymphocytic leukemia, chronic myelogenous leukemia, chronic myeloproliferative disorder, colon cancer, cutaneous T-cell lymphoma, desmoplastic small round cell tumor, endometrial cancer, ependymoma, epidermoid carcinoma, esophageal cancer, Ewing's sarcoma, extracranial germ cell tumor, extragonadal germ cell tumor, extrahepatic bile duct cancer, eye cancer/intraocular melanoma, eye cancer/retinoblastoma, gallbladder cancer, gallstone tumor, gastric/stomach cancer, gastrointestinal carcinoid tumor, gastrointestinal stromal tumor, giant cell tumor, glioblastoma multiforme, glioma, hairy-cell tumor, head and neck cancer, heart cancer, hepatocellular/liver cancer, Hodgkin lymphoma, hyperplasia, hyperplastic corneal nerve tumor, in situ carcinoma, hypopharyngeal cancer, intestinal ganglioneuroma, islet cell tumor, Kaposi's sarcoma, kidney/renal cell cancer, laryngeal cancer, leiomyoma tumor, lip and oral cavity cancer, liposarcoma, liver cancer, non-small cell lung cancer, small cell lung cancer, lymphomas, macroglobulinemia, malignant carcinoid, malignant fibrous histiocytoma of bone, malignant hypercalcemia, malignant melanomas, marfanoid habitus tumor, medullary carcinoma, melanoma, merkel cell carcinoma, mesothelioma, metastatic skin carcinoma, metastatic squamous neck cancer, mouth cancer, mucosal neuromas, multiple myeloma, mycosis fungoides, myelodysplastic syndrome, myeloma, myeloproliferative disorder, nasal cavity and paranasal sinus cancer, nasopharyngeal carcinoma, neck cancer, neural tissue cancer, neuroblastoma, oral cancer, oropharyngeal cancer, osteosarcoma, ovarian cancer, ovarian epithelial tumor, ovarian germ cell tumor, pancreatic cancer, parathyroid cancer, penile cancer, pharyngeal cancer, pheochromocytoma, pineal astrocytoma, pineal germinoma, pineoblastoma, pituitary adenoma, pleuropulmonary blastoma, polycythemia vera, primary brain tumor, prostate cancer, rectal cancer, renal cell tumor, reticulum cell sarcoma, retinoblastoma, rhabdomyosarcoma, salivary gland cancer, seminoma, Sezary syndrome, skin cancer, small intestine cancer, soft tissue sarcoma, squamous cell carcinoma, squamous neck carcinoma, stomach cancer, supratentorial primitive neuroectodermal tumor, testicular cancer, throat cancer, thymoma, thyroid cancer, topical skin lesion, trophoblastic tumor, urethral cancer, uterine/endometrial cancer, uterine sarcoma, vaginal cancer, vulvar cancer, Waldenstrom's macroglobulinemia and Wilm's tumor. The therapies include combination therapies such as combining the viral treatment with an additional anti-cancer therapy, such as, but not limited to chemotherapeutic compounds, toxins, alkylating agents, nitrosoureas, anticancer antibiotics, antimetabolites, antimitotics, topoisomerase inhibitors, cytokines, growth factors, hormones, photosensitizing agents, radionuclides, signaling modulators, anticancer antibodies, anticancer oligopeptides, anticancer oligonucleotides, angiogenesis inhibitors or radiation therapy, or combinations thereof.

### DETAILED DESCRIPTION

### Outline

### A. DEFINITIONS

[0019] B. OVERVIEW

[0020] 1. Gut Bacteria and Immune Response

[0021] 2. Viral Therapy

[0022] 3. Methods of Treatment with Antibiotics to Increase the Therapeutic Efficacy of

### Viral Therapy

### C. ANTIBIOTICS

[0023] Administrations and dosages

### D. VIRUSES

[0024] 1. Exemplary Oncolytic Viruses
[0025] a. Poxviruses—Vaccinia Viruses
   [0026] i. Modified Vaccinia Viruses
[0027] b. Other Oncolytic Viruses

[0028] 3. Modification of Viruses
[0029] a. Heterologous Nucleic Acid and Exemplary Modifications
   [0030] i. Diagnostic or reporter gene products
   [0031] ii. Therapeutic gene products
   [0032] iii. Antigens
   [0033] iv. Modifications to alter attenuation of the viruses
[0034] b. Control of heterologous gene expression
[0035] c. Methods for generating modified viruses

[0036] 4. Methods of Producing Viruses
[0037] a. Host cells for propagation
[0038] b. Concentration determination
[0039] c. Storage methods
[0040] d. Preparation of virus

### E. METHODS OF TREATMENT WITH ANTIBIOTICS FOR INCREASING THE THERAPEUTIC EFFICACY OF VIRAL THERAPY

[0041] 1. Therapeutic Methods

[0042] 2. Pharmaceutical Compositions, Combinations and Kits
[0043] a. Pharmaceutical compositions
[0044] b. Combinations
[0045] c. Kits

[0046] 3. Dosages and Administration
[0047] a. Steps prior to administering the virus
[0048] b. Mode of administration
[0049] c. Dosages and dosage regime
[0050] d. Combination Therapy
   [0051] i. Administering a plurality of viruses
   [0052] ii. Therapeutic Compounds
   [0053] iii. Immunotherapies and biological therapies
[0054] e. State of subject

[0055] 4. Monitoring Oncolytic Viral Therapy
[0056] a. Monitoring viral gene expression
[0057] b. Monitoring tumor size
[0058] c. Monitoring antibody titer
[0059] d. Monitoring general health diagnostics
[0060] e. Monitoring coordinated with treatment

### F. EXAMPLES

### A. DEFINITIONS

[0061] Unless defined otherwise, all technical and scientific terms used herein have the same meaning as is commonly understood by one of skill in the art to which the invention(s) belong. All patents, patent applications, published applications and publications, GENBANK sequences, websites and other published materials referred to throughout the entire disclosure herein, unless noted otherwise, are incorporated by reference in their entirety. In the event that there is a plurality of definitions for terms herein, those in this section prevail. Where reference is made to a URL or other such identifier or address, it is understood that such identifiers can change and particular information on the internet can come and go, but equivalent information is known and can be readily accessed, such as by searching the internet and/or appropriate databases. Reference thereto evidences the availability and public dissemination of such information.

[0062] As used herein, an “antibiotic” refers to an agent used for elimination of bacteria, such as for treatment of infections therefrom. Antibiotics for use herein are not employed for treatment of cancer and are distinct from anti-cancer antibiotics. Exemplary antibiotics for use in the methods herein are those that eliminate gut bacteria, are not anti-cancer antibiotics and include, but are not limited to, penicillin, streptomycin, ampicillin, neomycin, metronidazole, vancomycin, tazobactam, meropenem, or mixtures thereof.

[0063] As used herein, anti-cancer antibiotics are antibiotics that have anti-tumor activity and are employed a therapeutic agents for treatment of cancers. Exemplary anti-cancer antibiotics include, but are not limited to, anthracyclines such as doxorubicin hydrochloride (adriamycin), idarubicin hydrochloride, daunorubicin hydrochloride, aclarubicin hydrochloride, epirubicin hydrochloride and pirarubicin hydrochloride, phleomycins such as phleomycin and peplomycin sulfate, mitomycins such as mitomycin C, actinomycins such as actinomycin D, zinostatin stimalamer and polypeptides such as neocarzinostatin.

[0064] As used herein, an anti-mycotic is are agents used for the treatment of fungal infections, including those that follow antibiotic treatment. Exemplary of an anti-mycotic is amphotericin B.

[0065] As used herein, a subject includes any organism, including an animal, for whom diagnosis, screening, monitoring or treatment is contemplated. Animals include mammals, such as, for example, primates, domesticated animals and livestock. An exemplary primate is a human. Subject include any animals, such as, such as a mammal, primate, human, domesticated animal or livestock, or other animal subject afflicted with a disease condition or for which a disease condition is to be determined or risk of a disease condition is to be determined.

[0066] As used herein, a patient refers to a human subject exhibiting symptoms of a disease or disorder.

[0067] As used herein, animals include any animal, such as, but are not limited to, primates, including humans, apes and monkeys; rodents, such as mice, rats, rabbits, and ferrets; fowl, such as chickens; ruminants, such as goats, cows, deer, and sheep; horses, pigs, dogs, cats, fish, and other animals. Non-human animals exclude humans as the contemplated animal.

[0068] As used herein, the term “suffering from disease” refers to a subject (e.g., a human) who is experiencing a particular disease. It is not intended that the methods provided be limited to any particular signs or symptoms, nor disease. Thus, it is intended that the methods provided encompass subjects that are experiencing any range of disease, from sub-clinical to full-blown disease, wherein the subject exhibits at least some of the indicia (e.g., signs and symptoms) associated with the particular disease.

[0069] As used herein, the term “subject diagnosed with a cancer” refers to a subject who has been tested and found to have cancerous cells. The cancer can be diagnosed using any suitable method, including but not limited to, biopsy, x-ray, MRI, PET, blood test, and any diagnostic methods described herein.

[0070] As used herein, a “metastatic cell” is a cell that has the potential for metastasis. Metastatic cells have the ability to metastasize from a first tumor in a subject and can colonize tissue at a different site in the subject to form a second tumor at the site.

[0071] As used herein, a “metastasis” refers to the spread of cancer from one part of the body to another. For example, in the metastatic process, malignant cells can spread from the site of the primary tumor in which the malignant cells arose and move into lymphatic and blood vessels, which transport the cells to normal tissues elsewhere in an organism where the cells continue to proliferate. A tumor formed by cells that have spread by metastasis is called a “metastatic tumor,” a “secondary tumor” or a “metastasis.”

[0072] As used herein, “tumorigenic cell,” is a cell that, when introduced into a suitable site in a subject, can form a tumor. The cell can be non-metastatic or metastatic.

[0073] As used herein, a “normal cell” or “non-tumor cell” are used interchangeably and refer to a cell that is not derived from a tumor.

[0074] As used herein, the term “cell” refers to the basic unit of structure and function of a living organism as is commonly understood in the biological sciences. A cell can be a unicellular organism that is self-sufficient and that can exist as a functional whole independently of other cells. A cell also can be one that, when not isolated from the environment in which it occurs in nature, is part of a multicellular organism made up of more than one type of cell. Such a cell, which can be thought of as a “non-organism” or “non-organismal” cell, generally is specialized in that it performs only a subset of the functions performed by the multicellular organism as whole. Thus, this type of cell is not a unicellular organism. Such a cell can be a prokaryotic or eukaryotic cell, including animal cells, such as mammalian cells, human cells and non-human animal cells or non-human mammalian cells. Animal cells include any cell of animal origin that can be found in an animal. Thus, animal cells include, for example, cells that make up the various organs, tissues and systems of an animal.

[0075] As used herein an “isolated cell” is a cell that exists in vitro and is separate from the organism from which it was originally derived.

[0076] As used herein, a “cell line” is a population of cells derived from a primary cell that is capable of stable growth in vitro for many generations. Cell lines are commonly referred to as “immortalized” cell lines to describe their ability to continuously propagate in vitro.

[0077] As used herein a “tumor cell line: is a population of cells that is initially derived from a tumor. Such cells typically have undergone some change in vivo such that they theoretically have indefinite growth in culture; unlike primary cells, which can be cultured only for a finite period of time. Such cells can form tumors after they are injected into susceptible animals.

[0078] As used herein, a “primary cell” is a cell that has been isolated from a subject.

[0079] As used herein, a “host cell” or “target cell” are used interchangeably to mean a cell that can be infected by a virus.

[0080] As used herein, the term “tissue” refers to a group, collection or aggregate of similar cells generally acting to perform a specific function within an organism.

[0081] As used herein, “virus” refers to any of a large group of infectious entities that cannot grow or replicate without a host cell. Viruses typically contain a protein coat surrounding an RNA or DNA core of genetic material, but no semipermeable membrane, and are capable of growth and multiplication only in living cells. Viruses include, but are not limited to, poxviruses, herpesviruses, adenoviruses, adeno-associated viruses, lentiviruses, retroviruses, rhabdoviruses, papillomaviruses, vesicular stomatitis virus, measles virus, Newcastle disease virus, picornavirus, Sindbis virus, papillomavirus, parvovirus, reovirus, coxsackievirus, influenza virus, mumps virus, poliovirus, and semliki forest virus.

[0082] As used herein, oncolytic viruses refer to viruses that replicate selectively in tumor cells in tumorous subjects. Some oncolytic viruses can kill a tumor cell following infection of the tumor cell. For example, an oncolytic virus can cause death of the tumor cell by lysing the tumor cell or inducing cell death of the tumor cell.

[0083] As used herein the term “vaccinia virus” or “VACV” denotes a large, complex, enveloped virus belonging to the poxvirus family. It has a linear, double-stranded DNA genome approximately 190 kbp in length, and which encodes approximately 200 proteins. Vaccinia virus strains include, but are not limited to, strains of, derived from, or modified forms of Western Reserve (WR), Copenhagen, Tashkent, Tian Tan, Lister, Wyeth, IHD-J, and IHD-W, Brighton, Ankara, MVA, Dairen I, LIPV, LC16M8, LC16MO, LIVP, WR 65-16, Connaught, New York City Board of Health vaccinia virus strains.

[0084] As used herein, Lister Strain of the Institute of Viral Preparations (LIVP) or LIVP virus strain refers to a virus strain that is the attenuated Lister strain (ATCC Catalog No. VR-1549) that was produced by adaption to calf skin at the Institute of Viral Preparations, Moscow, Russia (Al'tshtein et al. (1985) Dokl. Akad. Nauk USSR 285:696-699). The LIVP strain can be obtained, for example, from the Institute of Viral Preparations, Moscow, Russia (see. e.g., Kutinova et al. (1995) Vaccine 13:487-493); the Microorganism Collection of FSRI SRC VB Vector (Kozlova et al. (2010) Environ. Sci. Technol. 44:5121-5126); or can be obtained from the Moscow Ivanovsky Institute of Virology (C0355 K0602; Agranovski et al. (2006) Atmospheric Environment 40:3924-3929). It also is well known to those of skill in the art; it was the vaccine strain used for vaccination in the USSR and throughout Asia and India. The strain is used by researchers and is well known (see e.g., Altshteyn et al. (1985) Dokl. Akad. Nauk USSR 285:696-699; Kutinova et al. (1994) Arch. Virol. 134:1-9; Kutinova et al. (1995) Vaccine 13:487-493; Shchelkunov et al. (1993) Virus Research 28:273-283; Sroller et al. (1998) Archives Virology 143:1311-1320; Zinoviev et al. (1994) Gene 147:209-214; and Chkheidze et al. (1993) FEBS 336:340-342). Among the LIVP strains is one that contains a genome having a sequence of nucleotides set forth in SEQ ID NO:2, or a sequence that is at least or at least about 99% identical to the sequence of nucleotides set forth in SEQ ID NO:2.

[0085] As used herein, an LIVP clonal strain or LIVP clonal isolate refers to a virus that is derived from the LIVP virus strain by plaque isolation, or other method in which a single clone is propagated, and that has a genome that is homogenous in sequence. Hence, an LIVP clonal strain includes a virus whose genome is present in a virus preparation propagated from LIVP. An LIVP clonal strain does not include a recombinant LIVP virus that is genetically engineered by recombinant means using recombinant DNA methods to introduce heterologous nucleic acid. In particular, an LIVP clonal strain has a genome that does not contain heterologous nucleic acid that contains an open reading frame encoding a heterologous protein. For example, an LIVP clonal strain has a genome that does not contain non-viral heterologous nucleic acid that contains an open reading frame encoding a non-viral heterologous protein. As described herein, however, it is understood that any of the LIVP clonal strains provided herein can be modified in its genome by recombinant means to generate a recombinant virus. For example, an LIVP clonal strain can be modified to generate a recombinant LIVP virus that contains insertion of nucleotides that contain an open reading frame encoding a heterologous protein.

[0086] As used herein, LIVP 1.1.1 is an LIVP clonal strain that has a genome having a sequence of nucleotides set forth in SEQ ID NO:3 or a genome having a sequence of nucleotides that has at least 97%, 98%, or 99% sequence identity to the sequence of nucleotides set forth in SEQ ID NO:3.

[0087] As used herein, LIVP 2.1.1 is an LIVP clonal strain that has a genome having a sequence of nucleotides set forth in SEQ ID NO:4, or a genome having a sequence of nucleotides that has at least 97%, 98%, or 99% sequence identity to the sequence of nucleotides set forth in SEQ ID NO:4.

[0088] As used herein, LIVP 4.1.1 is an LIVP clonal strain that has a genome having a sequence of nucleotides set forth in SEQ ID NO:5, or a genome having a sequence of nucleotides that has at least 97%, 98%, or 99% sequence identity to the sequence of nucleotides set forth in SEQ ID NO:5.

[0089] As used herein, LIVP 5.1.1 is an LIVP clonal strain that has a genome having a sequence of nucleotides set forth in SEQ ID NO:6, or a genome having a sequence of nucleotides that has at least 97%, 98%, or 99% sequence identity to the sequence of nucleotides set forth in SEQ ID NO:6.

[0090] As used herein, LIVP 6.1.1 is an LIVP clonal strain that has a genome having a sequence of nucleotides set forth in SEQ ID NO:7, or a genome having a sequence of nucleotides that has at least 97%, 98%, or 99% sequence identity to the sequence of nucleotides set forth in SEQ ID NO:7.

[0091] As used herein, LIVP 7.1.1 is an LIVP clonal strain that has a genome having a sequence of nucleotides set forth in SEQ ID NO:8, or a genome having a sequence of nucleotides that has at least 97%, 98%, or 99% sequence identity to the sequence of nucleotides set forth in SEQ ID NO:8.

[0092] As used herein, LIVP 8.1.1 is an LIVP clonal strain that has a genome having a sequence of nucleotides set forth in SEQ ID NO:9, or a genome having a sequence of nucleotides that has at least 97%, 98%, or 99% sequence identity to the sequence of nucleotides set forth in SEQ ID NO:9.

[0093] As used herein, the term “modified virus” refers to a virus that is altered compared to a parental strain of the virus. Typically modified viruses have one or more truncations, mutations, insertions or deletions in the genome of virus. A modified virus can have one or more endogenous viral genes modified and/or one or more intergenic regions modified. Exemplary modified viruses can have one or more heterologous nucleic acid sequences inserted into the genome of the virus. Modified viruses can contain one or more heterologous nucleic acid sequences in the form of a gene expression cassette for the expression of a heterologous gene.

[0094] As used herein, a modified LIVP virus strain refers to an LIVP virus that has a genome that is not contained in LIVP, but is a virus that is produced by modification of a genome of a strain derived from LIVP. Typically, the genome of the virus is modified by substitution (replacement), insertion (addition) or deletion (truncation) of nucleotides. Modifications can be made using any method known to one of skill in the art such as genetic engineering and recombinant DNA methods. Hence, a modified virus is a virus that is altered in its genome compared to the genome of a parental virus. Exemplary modified viruses have one or more heterologous nucleic acid sequences inserted into the genome of the virus. Typically, the heterologous nucleic acid contains an open reading frame encoding a heterologous protein. For example, modified viruses herein can contain one or more heterologous nucleic acid sequences in the form of a gene expression cassette for the expression of a heterologous gene.

[0095] As used herein, multiplicity of infection (MOI) refers to the ratio of viral particles to cells used for infection. For example, infection at a MOI of 1 mean that virus is added to a sample of cells at a ratio of 1 virus particle to one cell.

[0096] As used herein a “gene expression cassette” or “expression cassette” is a nucleic acid construct, containing nucleic acid elements that are capable of effecting expression of a gene in hosts that are compatible with such sequences. Expression cassettes include at least promoters and optionally, transcription termination signals. Typically, the expression cassette includes a nucleic acid to be transcribed operably linked to a promoter. Expression cassettes can contain genes that encode, for example, a therapeutic gene product, or a detectable protein or a selectable marker gene.

[0097] As used herein, a heterologous nucleic acid (also referred to as exogenous nucleic acid or foreign nucleic acid) refers to a nucleic acid that is not normally produced in vivo by an organism or virus from which it is expressed or that is produced by an organism or a virus but is at a different locus, or that mediates or encodes mediators that alter expression of endogenous nucleic acid, such as DNA, by affecting transcription, translation, or other regulatable biochemical processes. Hence, heterologous nucleic acid is often not normally endogenous to a virus into which it is introduced. Heterologous nucleic acid can refer to a nucleic acid molecule from another virus in the same organism or another organism, including the same species or another species. Heterologous nucleic acid, however, can be endogenous, but is nucleic acid that is expressed from a different locus or altered in its expression or sequence (e.g., a plasmid). Thus, heterologous nucleic acid includes a nucleic acid molecule not present in the exact orientation or position as the counterpart nucleic acid molecule, such as DNA, is found in a genome. Generally, although not necessarily, such nucleic acid encodes RNA and proteins that are not normally produced by the virus or in the same way in the virus in which it is expressed. Any nucleic acid, such as DNA, that one of skill in the art recognizes or considers as heterologous, exogenous or foreign to the virus in which the nucleic acid is expressed is herein encompassed by heterologous nucleic acid. Examples of heterologous nucleic acid include, but are not limited to, nucleic acid that encodes exogenous peptides/proteins, including diagnostic and/or therapeutic agents. Proteins that are encoded by heterologous nucleic acid can be expressed within the virus, secreted, or expressed on the surface of the virus in which the heterologous nucleic acid has been introduced.

[0098] As used herein, a heterologous protein or heterologous polypeptide (also referred to as exogenous protein, exogenous polypeptide, foreign protein or foreign polypeptide) refers to a protein that is not normally produced by a virus.

[0099] As used herein, operative linkage of heterologous nucleic acids to regulatory and effector sequences of nucleotides, such as promoters, enhancers, transcriptional and translational stop sites, and other signal sequences refers to the relationship between such nucleic acid, such as DNA, and such sequences of nucleotides. For example, operative linkage of heterologous DNA to a promoter refers to the physical relationship between the DNA and the promoter such that the transcription of such DNA is initiated from the promoter by an RNA polymerase that specifically recognizes, binds to and transcribes the DNA. Thus, operatively linked or operationally associated refers to the functional relationship of a nucleic acid, such as DNA, with regulatory and effector sequences of nucleotides, such as promoters, enhancers, transcriptional and translational stop sites, and other signal sequences. For example, operative linkage of DNA to a promoter refers to the physical and functional relationship between the DNA and the promoter such that the transcription of such DNA is initiated from the promoter by an RNA polymerase that specifically recognizes, binds to and transcribes the DNA. In order to optimize expression and/or transcription, it can be necessary to remove, add or alter 5′ untranslated portions of the clones to eliminate extra, potentially inappropriate, alternative translation initiation (i.e., start) codons or other sequences that can interfere with or reduce expression, either at the level of transcription or translation. In addition, consensus ribosome binding sites can be inserted immediately 5′ of the start codon and can enhance expression (see, e.g., Kozak J. Biol. Chem. 266: 19867-19870 (1991) and Shine and Delgarno, Nature 254(5495):34-38 (1975)). The desirability of (or need for) such modification can be empirically determined.

[0100] As used herein, a heterologous promoter refers to a promoter that is not normally found in the wild-type organism or virus or that is at a different locus as compared to a wild-type organism or virus. A heterologous promoter is often not endogenous to a virus into which it is introduced, but has been obtained from another virus or prepared synthetically. A heterologous promoter can refer to a promoter from another virus in the same organism or another organism, including the same species or another species. A heterologous promoter, however, can be endogenous, but is a promoter that is altered in its sequence or occurs at a different locus (e.g., at a different location in the genome or on a plasmid). Thus, a heterologous promoter includes a promoter not present in the exact orientation or position as the counterpart promoter is found in a genome.

[0101] A synthetic promoter is a heterologous promoter that has a nucleotide sequence that is not found in nature. A synthetic promoter can be a nucleic acid molecule that has a synthetic sequence or a sequence derived from a native promoter or portion thereof. A synthetic promoter also can be a hybrid promoter composed of different elements derived from different native promoters.

[0102] As used herein, a “reporter gene” is a gene that encodes a reporter molecule that can be detected when expressed by a virus provided herein or encodes a molecule that modulates expression of a detectable molecule, such as nucleic acid molecule or a protein, or modulates an activity or event that is detectable. Hence reporter molecules include, nucleic acid molecules, such as expressed RNA molecules, and proteins.

[0103] As used herein, a “heterologous reporter gene” is a reporter gene that is not natively present in a virus or is a gene that is present at a different locus than in its native locus in a virus. Heterologous reporter genes can contain nucleic acid that is not endogenous to the virus into which it is introduced, but has been obtained from another virus or cell or prepared synthetically. Heterologous reporter genes, however, can be endogenous, but contain nucleic acid that is expressed from a different locus or altered in its expression or sequence. Generally, such reporter genes encode RNA and proteins that are not normally produced by the virus or that are not produced under the same regulatory schema, such as the promoter.

[0104] As used herein, a “reporter protein” or “reporter gene product” refers to any detectable protein or product expressed by a reporter gene. Reporter proteins can be expressed from endogenous or heterologous genes. Exemplary reporter proteins are provided herein and include, for example, receptors or other proteins that can specifically bind to a detectable compound, proteins that can emit a detectable signal such as a fluorescence signal, and enzymes that can catalyze a detectable reaction or catalyze formation of a detectable product. Reporter gene products also can include detectable nucleic acids.

[0105] As used herein, a reporter virus is a virus that expresses or encodes a reporter gene or a reporter protein or a detectable protein or moiety. It is a virus that is detectable in a cell. As used herein, an oncolytic reporter virus is an oncolytic virus that expresses or encodes a reporter gene or a reporter protein or a detectable protein or moiety.

[0106] As used herein, detecting an oncolytic reporter virus means detecting tumor cells infected by the virus by one or more methods that detect a reporter gene product encoded by the virus that is expressed during infection of the tumor cell. Such methods include, but are not limited to detection of proteins such fluorescent proteins, luminescent proteins or proteins that bind to detectable ligands or antibodies.

[0107] As used herein, a fluorescent protein (FP) refers to a protein that possesses the ability to fluoresce (i.e., to absorb energy at one wavelength and emit it at another wavelength). For example, a green fluorescent protein (GFP) refers to a polypeptide that has a peak excitation spectrum at 490 nm or about 490 nm and peak emission spectrum at 510 nm or about 510 nm (expressed herein as excitation/emission 490 nm/510 nm). A variety of FPs that emit at various wavelengths are known in the art. Exemplary FPs include, but are not limited to, a violet fluorescent protein (VFP; peak excitation/emission at or about 355 nm/424 nm), a blue fluorescent protein (BFP; peak excitation/emission at or about 380-400 nm/450 nm), cyan fluorescent protein (CFP; peak excitation/emission at or about 430-460 nm/480-490 nm), green fluorescent protein (GFP; peak excitation/emission at or about 490 nm/510 nm), yellow fluorescent protein (YFP; peak excitation/emission at or about 515 nm/530 nm), orange fluorescent protein (OFP; peak excitation/emission at or about 550 nm/560 nm), red fluorescent protein (RFP; peak excitation/emission at or about 560-590 nm/580-610 nm), far-red fluorescent protein (peak excitation/emission at or about 590 nm/630-650 nm), or near-infrared fluorescent protein (peak excitation/emission at or about 690 nm/713 nm). Extending the spectrum of available colors of fluorescent proteins to blue, cyan, orange, yellow and red variants provides a method for multicolor tracking of proteins.

[0108] As used herein, Aequorea GFP refers to GFPs from the genus Aequorea and to mutants or variants thereof. Such variants and GFPs from other species, such as Anthozoa reef coral, Anemonia sea anemone, Renilla sea pansy, Galaxea coral, Acropora brown coral, Trachyphyllia and Pectimidae stony coral and other species are well known and are available and known to those of skill in the art.

[0109] As used herein, luminescence refers to the detectable electromagnetic (EM) radiation, generally, ultraviolet (UV), infrared (IR) or visible EM radiation that is produced when the excited product of an exergonic chemical process reverts to its ground state with the emission of light. Chemiluminescence is luminescence that results from a chemical reaction. Bioluminescence is chemiluminescence that results from a chemical reaction using biological molecules (or synthetic versions or analogs thereof) as substrates and/or enzymes. Fluorescence is luminescence in which light of a visible color is emitted from a substance under stimulation or excitation by light or other forms radiation such as ultraviolet (UV), infrared (IR) or visible EM radiation.

[0110] As used herein, chemiluminescence refers to a chemical reaction in which energy is specifically channeled to a molecule causing it to become electronically excited and subsequently to release a photon, thereby emitting visible light. Temperature does not contribute to this channeled energy. Thus, chemiluminescence involves the direct conversion of chemical energy to light energy.

[0111] As used herein, bioluminescence, which is a type of chemiluminescence, refers to the emission of light by biological molecules, particularly proteins. The essential condition for bioluminescence is molecular oxygen, either bound or free in the presence of an oxygenase, a luciferase, which acts on a substrate, a luciferin. Bioluminescence is generated by an enzyme or other protein (luciferase) that is an oxygenase that acts on a substrate luciferin (a bioluminescence substrate) in the presence of molecular oxygen and transforms the substrate to an excited state, which, upon return to a lower energy level releases the energy in the form of light.

[0112] As used herein, the substrates and enzymes for producing bioluminescence are generically referred to as luciferin and luciferase, respectively. When reference is made to a particular species thereof, for clarity, each generic term is used with the name of the organism from which it derives such as, for example, click beetle luciferase or firefly luciferase.

[0113] As used herein, luciferase refers to oxygenases that catalyze a light emitting reaction. For instance, bacterial luciferases catalyze the oxidation of flavin mononucleotide (FMN) and aliphatic aldehydes, which reaction produces light. Another class of luciferases, found among marine arthropods, catalyzes the oxidation of Cypridina (Vargula) luciferin and another class of luciferases catalyzes the oxidation of Coleoptera luciferin. Thus, luciferase refers to an enzyme or photoprotein that catalyzes a bioluminescent reaction (a reaction that produces bioluminescence). The luciferases, such as firefly and Gaussia and Renilla luciferases, are enzymes which act catalytically and are unchanged during the bioluminescence generating reaction. The luciferase photoproteins, such as the aequorin photoprotein to which luciferin is non-covalently bound, are changed, such as by release of the luciferin, during bioluminescence generating reaction. The luciferase is a protein, or a mixture of proteins (e.g., bacterial luciferase), that occurs naturally in an organism or a variant or mutant thereof, such as a variant produced by mutagenesis that has one or more properties, such as thermal stability, that differ from the naturally-occurring protein. Luciferases and modified mutant or variant forms thereof are well known. For purposes herein, reference to luciferase refers to either the photoproteins or luciferases.

[0114] Reference, for example, to Renilla luciferase refers to an enzyme isolated from member of the genus Renilla or an equivalent molecule obtained from any other source, such as from another related copepod, or that has been prepared synthetically. It is intended to encompass Renilla luciferases with conservative amino acid substitutions that do not substantially alter activity. Conservative substitutions of amino acids are known to those of skill in the art and can be made generally without altering the biological activity of the resulting molecule. Those of skill in the art recognize that, in general, single amino acid substitutions in non-essential regions of a polypeptide do not substantially alter biological activity (see, e.g., Watson et al. Molecular Biology of the Gene, 4th Edition, 1987, The Benjamin/Cummings Pub. co., p. 224).

[0115] As used herein, bioluminescence substrate refers to the compound that is oxidized in the presence of a luciferase and any necessary activators and generates light. These substrates are referred to as luciferins herein, are substrates that undergo oxidation in a bioluminescence reaction. These bioluminescence substrates include any luciferin or analog thereof or any synthetic compound with which a luciferase interacts to generate light. Typical substrates include those that are oxidized in the presence of a luciferase or protein in a light-generating reaction. Bioluminescence substrates, thus, include those compounds that those of skill in the art recognize as luciferins. Luciferins, for example, include firefly luciferin, Cypridina (also known as Vargula) luciferin (coelenterazine), bacterial luciferin, as well as synthetic analogs of these substrates or other compounds that are oxidized in the presence of a luciferase in a reaction the produces bioluminescence.

[0116] As used herein, capable of conversion into a bioluminescence substrate refers to being susceptible to chemical reaction, such as oxidation or reduction, which yields a bioluminescence substrate. For example, the luminescence producing reaction of bioluminescent bacteria involves the reduction of a flavin mononucleotide group (FMN) to reduced flavin mononucleotide (FMNH₂) by a flavin reductase enzyme. The reduced flavin mononucleotide (substrate) then reacts with oxygen (an activator) and bacterial luciferase to form an intermediate peroxy flavin that undergoes further reaction, in the presence of a long-chain aldehyde, to generate light. With respect to this reaction, the reduced flavin and the long chain aldehyde are bioluminescence substrates.

[0117] As used herein, a bioluminescence generating system refers to the set of reagents required to conduct a bioluminescent reaction. Thus, the specific luciferase, luciferin and other substrates, solvents and other reagents that can be required to complete a bioluminescent reaction form a bioluminescence system. Thus a bioluminescence generating system refers to any set of reagents that, under appropriate reaction conditions, yield bioluminescence. Appropriate reaction conditions refer to the conditions necessary for a bioluminescence reaction to occur, such as pH, salt concentrations and temperature. In general, bioluminescence systems include a bioluminescence substrate, luciferin, a luciferase, which includes enzymes luciferases and photoproteins and one or more activators. A specific bioluminescence system can be identified by reference to the specific organism from which the luciferase derives; for example, the Renilla bioluminescence system includes a Renilla luciferase, such as a luciferase isolated from Renilla or produced using recombinant methods or modifications of these luciferases. This system also includes the particular activators necessary to complete the bioluminescence reaction, such as oxygen and a substrate with which the luciferase reacts in the presence of the oxygen to produce light.

[0118] As used herein, the term “modified” with reference to a gene refers to a gene encoding a gene product, having one or more truncations, mutations, insertions or deletions; to a deleted gene; or to a gene encoding a gene product that is inserted (e.g., into the chromosome or on a plasmid, phagemid, cosmid, and phage), typically accompanied by at least a change in function of the modified gene product or virus.

[0119] As used herein, a “non-essential gene or region” of a virus genome is a location or region that can be modified by insertion, deletion, or mutation without inhibiting the infection life cycle of the virus. Modification of a “non-essential gene or region” is intended to encompass modifications that have no effect on the virus life cycle and modifications that attenuate or reduce the toxicity of the virus, but do not completely inhibit infection, replication and production of new virus.

[0120] As used herein, an “attenuated virus” refers to a virus that has been modified to alter one or more properties of the virus that affect, for example, virulence, toxicity, or pathogenicity of the virus compared to a virus without such modification. Typically, the viruses for use in the methods provided herein are attenuated viruses with respect to the wild-type form of the virus.

[0121] As used herein, an “attenuated LIVP virus” with reference to LIVP refers to a virus that exhibits reduced or less virulence, toxicity or pathogenicity compared to LIVP.

[0122] As used herein, “toxicity” (also referred to as virulence or pathogenicity herein) with reference to a virus refers to the deleterious or toxic effects to a host upon administration of the virus. For an oncolytic virus, such as LIVP, the toxicity of a virus is associated with its accumulation in non-tumorous organs or tissues, which can impact the survival of the host or result in deleterious or toxic effects. Toxicity can be measured by assessing one or more parameters indicative of toxicity. These include accumulation in non-tumorous tissues and effects on viability or health of the subject to whom it has been administered, such as effects on weight.

[0123] As used herein, “reduced toxicity” means that the toxic or deleterious effects upon administration of the virus to a host are attenuated or lessened compared to a host that is administered with another reference or control virus. For purposes herein, exemplary of a reference or control virus with respect to toxicity is the LIVP virus designated GLV-1h68 (described, for example, in U.S. Pat. No. 7,588,767; see, also SEQ ID NO:1) or a virus that is the same as the virus administered except not including a particular modification that reduces toxicity. Whether toxicity is reduced or lessened can be determined by assessing the effect of a virus and, if necessary, a control or reference virus, on a parameter indicative of toxicity. It is understood that when comparing the activity of two or more different viruses, the amount of virus (e.g. pfu) used in an in vitro assay or administered in vivo is the same or similar and the conditions (e.g. in vivo dosage regime) of the in vitro assay or in vivo assessment are the same or similar. For example, when comparing effects upon in vivo administration of a virus and a control or reference virus the subjects are the same species, size, gender and the virus is administered in the same or similar amount under the same or similar dosage regime. In particular, a virus with reduced toxicity can mean that upon administration of the virus to a host, such as for the treatment of a disease, the virus does not accumulate in non-tumorous organs and tissues in the host to an extent that results in damage or harm to the host, or that impacts survival of the host to a greater extent than the disease being treated does or to a greater extent than a control or reference virus does. For example, a virus with reduced toxicity includes a virus that does not result in death of the subject over the course of treatment.

[0124] As used herein, accumulation of a virus in a particular tissue refers to the distribution of the virus in particular tissues of a host organism after a time period following administration of the virus to the host, long enough for the virus to infect the host's organs or tissues. As one skilled in the art will recognize, the time period for infection of a virus will vary depending on the virus, the organ(s) or tissue(s), the immunocompetence of the host and dosage of the virus. Generally, accumulation can be determined at time points from about less than 1 day, about 1 day to about 2, 3, 4, 5, 6 or 7 days, about 1 week to about 2, 3 or 4 weeks, about 1 month to about 2, 3, 4, 5, 6 months or longer after infection with the virus. For purposes herein, the viruses preferentially accumulate in immunoprivileged tissue, such as inflamed tissue or tumor tissue, but are cleared from other tissues and organs, such as non-tumor tissues, in the host to the extent that toxicity of the virus is mild or tolerable and at most, not fatal.

[0125] As used herein, “preferential accumulation” refers to accumulation of a virus at a first location at a higher level than accumulation at a second location (i.e., the concentration of viral particles, or titer, at the first location is higher than the concentration of viral particles at the second location). Thus, a virus that preferentially accumulates in immunoprivileged tissue (tissue that is sheltered from the immune system), such as inflamed tissue, and tumor tissue, relative to normal tissues or organs, refers to a virus that accumulates in immunoprivileged tissue, such as tumor, at a higher level (i.e., concentration or viral titer) than the virus accumulates in normal tissues or organs.

[0126] As used herein, the terms immunoprivileged cells and immunoprivileged tissues refer to cells and tissues, such as solid tumors, which are sequestered from the immune system. Generally, administration of a virus to a subject elicits an immune response that clears the virus from the subject. Immunoprivileged sites, however, are shielded or sequestered from the immune response, permitting the virus to survive and generally to replicate. Immunoprivileged tissues include proliferating tissues, such as tumor tissues.

[0127] As used herein, “anti-tumor activity” or “anti-tumorigenic” refers to virus strains that prevent or inhibit the formation or growth of tumors in vitro or in vivo in a subject. Anti-tumor activity can be determined by assessing a parameter or parameters indicative of anti-tumor activity.

[0128] As used herein, “greater” or “improved” activity with reference to anti-tumor activity or anti-tumorigenicity means that a virus strain is capable of preventing or inhibiting the formation or growth of tumors in vitro or in vivo in a subject to a greater extent than a reference or control virus or to a greater extent than absence of treatment with the virus. Whether anti-tumor activity is “greater” or “improved” can be determined by assessing the effect of a virus and, if necessary, a control or reference virus, on a parameter indicative of anti-tumor activity. It is understood that when comparing the activity of two or more different viruses, the amount of virus (e.g. pfu) used in an in vitro assay or administered in vivo is the same or similar, and the conditions (e.g. in vivo dosage regime) of the in vitro assay or in vivo assessment are the same or similar.

[0129] As used herein, “genetic therapy” or “gene therapy” involves the transfer of heterologous nucleic acid, such as DNA, into certain cells, target cells, of a mammal, particularly a human, with a disorder or conditions for which such therapy is sought. The nucleic acid, such as DNA, is introduced into the selected target cells, such as directly or in a vector or other delivery vehicle, in a manner such that the heterologous nucleic acid, such as DNA, is expressed and a therapeutic product encoded thereby is produced. Alternatively, the heterologous nucleic acid, such as DNA, can in some manner mediate expression of DNA that encodes the therapeutic product, or it can encode a product, such as a peptide or RNA that in some manner mediates, directly or indirectly, expression of a therapeutic product. Genetic therapy also can be used to deliver nucleic acid encoding a gene product that replaces a defective gene or supplements a gene product produced by the mammalian or the cell in which it is introduced. The introduced nucleic acid can encode a therapeutic compound, such as a growth factor inhibitor thereof, or a tumor necrosis factor or inhibitor thereof, such as a receptor therefor, that is not normally produced in the mammalian host or that is not produced in therapeutically effective amounts or at a therapeutically useful time. The heterologous nucleic acid, such as DNA, encoding the therapeutic product can be modified prior to introduction into the cells of the afflicted host in order to enhance or otherwise alter the product or expression thereof. Genetic therapy also can involve delivery of an inhibitor or repressor or other modulator of gene expression.

[0130] As used herein, the terms overproduce or overexpress when used in reference to a substance, molecule, compound or composition made in a cell refers to production or expression at a level that is greater than a baseline, normal or usual level of production or expression of the substance, molecule, compound or composition by the cell. A baseline, normal or usual level of production or expression includes no production/expression or limited, restricted or regulated production/expression. Such overproduction or overexpression is typically achieved by modification of cell.

[0131] As used herein, a tumor, also known as a neoplasm, is an abnormal mass of tissue that results when cells proliferate at an abnormally high rate. Tumors can show partial or total lack of structural organization and functional coordination with normal tissue. Tumors can be benign (not cancerous), or malignant (cancerous). As used herein, a tumor is intended to encompass hematopoietic tumors as well as solid tumors.

[0132] Malignant tumors can be broadly classified into three major types. Carcinomas are malignant tumors arising from epithelial structures (e.g. breast, prostate, lung, colon, pancreas). Sarcomas are malignant tumors that originate from connective tissues, or mesenchymal cells, such as muscle, cartilage, fat or bone. Leukemias and lymphomas are malignant tumors affecting hematopoietic structures (structures pertaining to the formation of blood cells) including components of the immune system. Other malignant tumors include, but are not limited to, tumors of the nervous system (e.g. neurofibromatomas), germ cell tumors, and plastic tumors.

[0133] As used herein, a disease or disorder refers to a pathological condition in an organism resulting from, for example, infection or genetic defect, and characterized by identifiable symptoms. An exemplary disease as described herein is a neoplastic disease, such as cancer.

[0134] As used herein, proliferative disorders include any disorders involving abnormal proliferation of cells (i.e. cells proliferate more rapidly compared to normal tissue growth), such as, but not limited to, neoplastic diseases.

[0135] As used herein, neoplastic disease refers to any disorder involving cancer, including tumor development, growth, metastasis and progression.

[0136] As used herein, cancer is a term for diseases caused by or characterized by any type of malignant tumor, including metastatic cancers, lymphatic tumors, and blood cancers. Exemplary cancers include, but are not limited to, acute lymphoblastic leukemia, acute lymphoblastic leukemia, acute myeloid leukemia, acute promyelocytic leukemia, adenocarcinoma, adenoma, adrenal cancer, adrenocortical carcinoma, AIDS-related cancer, AIDS-related lymphoma, anal cancer, appendix cancer, astrocytoma, basal cell carcinoma, bile duct cancer, bladder cancer, bone cancer, osteosarcoma/malignant fibrous histiocytoma, brainstem glioma, brain cancer, carcinoma, cerebellar astrocytoma, cerebral astrocytoma/malignant glioma, ependymoma, medulloblastoma, supratentorial primitive neuroectodermal tumor, visual pathway or hypothalamic glioma, breast cancer, bronchial adenoma/carcinoid, Burkitt lymphoma, carcinoid tumor, carcinoma, central nervous system lymphoma, cervical cancer, chronic lymphocytic leukemia, chronic myelogenous leukemia, chronic myeloproliferative disorder, colon cancer, cutaneous T-cell lymphoma, desmoplastic small round cell tumor, endometrial cancer, ependymoma, epidermoid carcinoma, esophageal cancer, Ewing's sarcoma, extracranial germ cell tumor, extragonadal germ cell tumor, extrahepatic bile duct cancer, eye cancer/intraocular melanoma, eye cancer/retinoblastoma, gallbladder cancer, gallstone tumor, gastric/stomach cancer, gastrointestinal carcinoid tumor, gastrointestinal stromal tumor, giant cell tumor, glioblastoma multiforme, glioma, hairy-cell tumor, head and neck cancer, heart cancer, hepatocellular/liver cancer, Hodgkin lymphoma, hyperplasia, hyperplastic corneal nerve tumor, in situ carcinoma, hypopharyngeal cancer, intestinal ganglioneuroma, islet cell tumor, Kaposi's sarcoma, kidney/renal cell cancer, laryngeal cancer, leiomyoma tumor, lip and oral cavity cancer, liposarcoma, liver cancer, non-small cell lung cancer, small cell lung cancer, lymphomas, macroglobulinemia, malignant carcinoid, malignant fibrous histiocytoma of bone, malignant hypercalcemia, malignant melanomas, marfanoid habitus tumor, medullary carcinoma, melanoma, merkel cell carcinoma, mesothelioma, metastatic skin carcinoma, metastatic squamous neck cancer, mouth cancer, mucosal neuromas, multiple myeloma, mycosis fungoides, myelodysplastic syndrome, myeloma, myeloproliferative disorder, nasal cavity and paranasal sinus cancer, nasopharyngeal carcinoma, neck cancer, neural tissue cancer, neuroblastoma, oral cancer, oropharyngeal cancer, osteosarcoma, ovarian cancer, ovarian epithelial tumor, ovarian germ cell tumor, pancreatic cancer, parathyroid cancer, penile cancer, pharyngeal cancer, pheochromocytoma, pineal astrocytoma, pineal germinoma, pineoblastoma, pituitary adenoma, pleuropulmonary blastoma, polycythemia vera, primary brain tumor, prostate cancer, rectal cancer, renal cell tumor, reticulum cell sarcoma, retinoblastoma, rhabdomyosarcoma, salivary gland cancer, seminoma, Sezary syndrome, skin cancer, small intestine cancer, soft tissue sarcoma, squamous cell carcinoma, squamous neck carcinoma, stomach cancer, supratentorial primitive neuroectodermal tumor, testicular cancer, throat cancer, thymoma, thyroid cancer, topical skin lesion, trophoblastic tumor, urethral cancer, uterine/endometrial cancer, uterine sarcoma, vaginal cancer, vulvar cancer, Waldenstrom's macroglobulinemia or Wilm's tumor. Exemplary cancers commonly diagnosed in humans include, but are not limited to, cancers of the bladder, brain, breast, bone marrow, cervix, colon/rectum, kidney, liver, lung/bronchus, ovary, pancreas, prostate, skin, stomach, thyroid, or uterus. Exemplary cancers commonly diagnosed in dogs, cats, and other pets include, but are not limited to, lymphosarcoma, osteosarcoma, mammary tumors, mastocytoma, brain tumor, melanoma, adenosquamous carcinoma, carcinoid lung tumor, bronchial gland tumor, bronchiolar adenocarcinoma, fibroma, myxochondroma, pulmonary sarcoma, neurosarcoma, osteoma, papilloma, retinoblastoma, Ewing's sarcoma, Wilm's tumor, Burkitt's lymphoma, microglioma, neuroblastoma, osteoclastoma, oral neoplasia, fibrosarcoma, osteosarcoma and rhabdomyosarcoma, genital squamous cell carcinoma, transmissible venereal tumor, testicular tumor, seminoma, Sertoli cell tumor, hemangiopericytoma, histiocytoma, chloroma (e.g., granulocytic sarcoma), corneal papilloma, corneal squamous cell carcinoma, hemangiosarcoma, pleural mesothelioma, basal cell tumor, thymoma, stomach tumor, adrenal gland carcinoma, oral papillomatosis, hemangioendothelioma and cystadenoma, follicular lymphoma, intestinal lymphosarcoma, fibrosarcoma and pulmonary squamous cell carcinoma. Exemplary cancers diagnosed in rodents, such as a ferret, include, but are not limited to, insulinoma, lymphoma, sarcoma, neuroma, pancreatic islet cell tumor, gastric MALT lymphoma and gastric adenocarcinoma. Exemplary neoplasias affecting agricultural livestock include, but are not limited to, leukemia, hemangiopericytoma and bovine ocular neoplasia (in cattle); preputial fibrosarcoma, ulcerative squamous cell carcinoma, preputial carcinoma, connective tissue neoplasia and mastocytoma (in horses); hepatocellular carcinoma (in swine); lymphoma and pulmonary adenomatosis (in sheep); pulmonary sarcoma, lymphoma, Rous sarcoma, reticulo-endotheliosis, fibrosarcoma, nephroblastoma, B-cell lymphoma and lymphoid leukosis (in avian species); retinoblastoma, hepatic neoplasia, lymphosarcoma (lymphoblastic lymphoma), plasmacytoid leukemia and swimbladder sarcoma (in fish), caseous lymphadenitis (CLA): chronic, infectious, contagious disease of sheep and goats caused by the bacterium Corynebacterium pseudotuberculosis, and contagious lung tumor of sheep caused by jaagsiekte.

[0137] As used herein, an aggressive cancer refers to a cancer characterized by a rapidly growing tumor or tumors. Typically the tumor(s) is actively metastasizing or is at risk of metastasizing. Aggressive cancer typically refer to metastatic cancers that spread to multiple locations in the body.

[0138] As used herein, an in vivo method refers to any method that is performed within the living body of a subject.

[0139] As used herein, an in vitro method refers to any method that is performed outside the living body of a subject.

[0140] As used herein, an ex vivo method refers to a method performed on a sample obtained from a subject.

[0141] As used herein, the term “therapeutic virus” refers to a virus that is administered for the treatment of a disease or disorder, such as a neoplastic disease, such as cancer, a tumor and/or a metastasis or inflammation or wound or diagnosis thereof and or both. Generally, a therapeutic virus herein is one that exhibits anti-tumor activity and minimal toxicity.

[0142] As used herein, a disease or disorder refers to a pathological condition in an organism resulting from, for example, infection or genetic defect, and characterized by identifiable symptoms.

[0143] As used herein, treatment of a subject that has a neoplastic disease, including a tumor or metastasis, means any manner of treatment in which the symptoms of having the neoplastic disease are ameliorated or otherwise beneficially altered. Typically, treatment of a tumor or metastasis in a subject encompasses any manner of treatment that results in slowing of tumor growth, lysis of tumor cells, reduction in the size of the tumor, prevention of new tumor growth, or prevention of metastasis of a primary tumor, including inhibition vascularization of the tumor, tumor cell division, tumor cell migration or degradation of the basement membrane or extracellular matrix.

[0144] As used herein, therapeutic effect means an effect resulting from treatment of a subject that alters, typically improves or ameliorates the symptoms of a disease or condition or that cures a disease or condition. A therapeutically effective amount refers to the amount of a composition, molecule or compound which results in a therapeutic effect following administration to a subject.

[0145] As used herein, amelioration or alleviation of the symptoms of a particular disorder, such as by administration of a particular pharmaceutical composition, refers to any lessening, whether permanent or temporary, lasting or transient that can be attributed to or associated with administration of the composition.

[0146] As used herein, efficacy means that upon systemic administration of an oncolytic virus, the virus will colonize tumor cells and replicate. In particular, it will replicate sufficiently so that tumor cells released into circulation will contain virus. Colonization and replication in tumor cells is indicative that the treatment is or will be an effective treatment.

[0147] As used herein, effective treatment with a virus is one that can increase survival compared to the absence of treatment therewith. For example, a virus is an effective treatment if it stabilizes disease, causes tumor regression, decreases severity of disease or slows down or reduces metastasizing of the tumor.

[0148] As used herein, therapeutic agents are agents that ameliorate the symptoms of a disease or disorder or ameliorate the disease or disorder. Therapeutic agents can be any molecule, such as a small molecule, a peptide, a polypeptide, a protein, an antibody, an antibody fragment, a DNA, or a RNA. Therapeutic agent, therapeutic compound, or therapeutic regimens include conventional drugs and drug therapies, including vaccines for treatment or prevention (i.e., reducing the risk of getting a particular disease or disorder), which are known to those skilled in the art and described elsewhere herein. Therapeutic agents for the treatment of neoplastic disease include, but are not limited to, moieties that inhibit cell growth or promote cell death, that can be activated to inhibit cell growth or promote cell death, or that activate another agent to inhibit cell growth or promote cell death. Therapeutic agents for use in the methods provided herein can be, for example, an anticancer agent. Exemplary therapeutic agents include, for example, therapeutic microorganisms, such as therapeutic viruses and bacteria, chemotherapeutic compounds, cytokines, growth factors, hormones, photosensitizing agents, radionuclides, toxins, antimetabolites, signaling modulators, anticancer antibiotics, anticancer antibodies, anti-cancer oligopeptides, anti-cancer oligonucleotide (e.g., antisense RNA and siRNA), angiogenesis inhibitors, radiation therapy, or a combination thereof.

[0149] As used herein, an anti-cancer agent or compound (used interchangeably with “anti-tumor or anti-neoplastic agent”) refers to any agents, or compounds, used in anti-cancer treatment. These include any agents, when used alone or in combination with other compounds or treatments, that can alleviate, reduce, ameliorate, prevent, or place or maintain in a state of remission of clinical symptoms or diagnostic markers associated with neoplastic disease, tumors and cancer, and can be used in methods, combinations and compositions provided herein.

[0150] As used herein, a “chemotherapeutic agent” is any drug or compound that is used in anti-cancer treatment. Exemplary of such agents are alkylating agents, nitrosoureas, antitumor antibiotics, antimetabolites, antimitotics, topoisomerase inhibitors, monoclonal antibodies, and signaling inhibitors. Exemplary chemotherapeutic agent include, but are not limited to, chemotherapeutic agents, such as Ara-C, cisplatin, carboplatin, paclitaxel, doxorubicin, gemcitabine, camptothecin, irinotecan, cyclophosphamide, 6-mercaptopurine, vincristine, 5-fluorouracil, and methotrexate. The term “chemotherapeutic agent” can be used interchangeably with the term “anti-cancer agent” when referring to drugs or compounds for the treatment of cancer. As used herein, reference to a chemotherapeutic agent includes combinations or a plurality of chemotherapeutic agents unless otherwise indicated.

[0151] As used herein, an anti-metastatic agent is an agent that ameliorates the symptoms of metastasis or ameliorates metastasis. Generally, anti-metastatic agents directly or indirectly inhibit one or more steps of metastasis, including but not limited to, degradation of the basement membrane and proximal extracellular matrix, which leads to tumor cell detachment from the primary tumor, tumor cell migration, tumor cell invasion of local tissue, tumor cell division and colonization at the secondary site, organization of endothelial cells into new functioning capillaries in a tumor, and the persistence of such functioning capillaries in a tumor. Anti-metastatic agents include agents that inhibit the metastasis of a cell from a primary tumor, including release of the cell from the primary tumor and establishment of a secondary tumor, or that inhibits further metastasis of a cell from a site of metastasis. Treatment of a tumor bearing subject with anti-metastatic agents can result in, for example, the delayed appearance of secondary (i.e. metastatic) tumors, slowed development of primary or secondary tumors, decreased occurrence of secondary tumors, slowed or decreased severity of secondary effects of neoplastic disease, arrested tumor growth and regression.

[0152] As used herein, an effective amount of a virus or compound for treating a particular disease is an amount that is sufficient to ameliorate, or in some manner reduce the symptoms associated with the disease. Such an amount can be administered as a single dosage or can be administered in multiple dosages according to a regimen, whereby it is effective. The amount can cure the disease but, typically, is administered in order to ameliorate the symptoms of the disease. Repeated administration can be required to achieve the desired amelioration of symptoms.

[0153] As used herein, a compound produced in a tumor refers to any compound that is produced in the tumor or tumor environment by virtue of the presence of an introduced virus, generally a recombinant virus, expressing one or more gene products. For example, a compound produced in a tumor can be, for example, an encoded polypeptide or RNA, a metabolite, or compound that is generated by a recombinant polypeptide and the cellular machinery of the tumor.

[0154] As used herein, the term “ELISA” refers to enzyme-linked immunosorbent assay. Numerous methods and applications for carrying out an ELISA are well known in the art, and provided in many sources (See, e.g., Crowther, “Enzyme-Linked Immunosorbent Assay (ELISA),” in Molecular Biomethods Handbook, Rapley et al. [eds.], pp. 595-617, Hzumana Press, Inc., Totowa, N.J. [1998]; Harlow and Lane (eds.), Antibodies: A Laboratory Manual, Cold Spring Harbor Laboratory Press [1988]; and Ausubel et al. (eds.), Current Protocols in Molecular Biology, Ch. 11, John Wiley & Sons, Inc., New York [1994]; and Newton, et al. (2006) Neoplasia. 8:772-780). A “direct ELISA” protocol involves a target-binding molecule, such as a cell, cell lysate, or isolated protein, first bound and immobilized to a microtiter plate well. A “sandwich ELISA” involves a target-binding molecule attached to the substrate by capturing it with an antibody that has been previously bound to the microtiter plate well. The ELISA method detects an immobilized ligand-receptor complex (binding) by use of fluorescent detection of fluorescently labeled ligands or an antibody-enzyme conjugate, where the antibody is specific for the antigen of interest, such as a phage virion, while the enzyme portion allows visualization and quantitation by the generation of a colored or fluorescent reaction product. The conjugated enzymes commonly used in the ELISA include horseradish peroxidase, urease, alkaline phosphatase, glucoamylase or O-galactosidase. The intensity of color development is proportional to the amount of antigen present in the reaction well.

[0155] As used herein, a delivery vehicle for administration refers to a lipid-based or other polymer-based composition, such as liposome, micelle or reverse micelle, that associates with an agent, such as a virus provided herein, for delivery into a host subject.

[0156] As used herein, a “diagnostic agent” refer to any agent that can be applied in the diagnosis or monitoring of a disease or health-related condition. The diagnostic agent can be any molecule, such as a small molecule, a peptide, a polypeptide, a protein, an antibody, an antibody fragment, a DNA, or a RNA.

[0157] As used herein, a detectable label or detectable moiety or diagnostic moiety (also imaging label, imaging agent, or imaging moiety) refers to an atom, molecule or composition, wherein the presence of the atom, molecule or composition can be directly or indirectly measured. Detectable labels can be used to image one or more of any of the viruses provided herein. Detectable labels can be used in any of the methods provided herein. Detectable labels include, for example, chemiluminescent moieties, bioluminescent moieties, fluorescent moieties, radionuclides, and metals. Methods for detecting labels are well known in the art. Such a label can be detected, for example, by visual inspection, by fluorescence spectroscopy, by reflectance measurement, by flow cytometry, by X-rays, by a variety of magnetic resonance methods such as magnetic resonance imaging (MRI) and magnetic resonance spectroscopy (MRS). Methods of detection also include any of a variety of tomographic methods including computed tomography (CT), computed axial tomography (CAT), electron beam computed tomography (EBCT), high resolution computed tomography (HRCT), hypocycloidal tomography, positron emission tomography (PET), single-photon emission computed tomography (SPECT), spiral computed tomography, and ultrasonic tomography. Direct detection of a detectable label refers to, for example, measurement of a physical phenomenon of the detectable label itself, such as energy or particle emission or absorption of the label itself, such as by X-ray or MRI. Indirect detection refers to measurement of a physical phenomenon of an atom, molecule or composition that binds directly or indirectly to the detectable label, such as energy or particle emission or absorption, of an atom, molecule or composition that binds directly or indirectly to the detectable label. In a non-limiting example of indirect detection, a detectable label can be biotin, which can be detected by binding to avidin. Non-labeled avidin can be administered systemically to block non-specific binding, followed by systemic administration of labeled avidin. Thus, included within the scope of a detectable label or detectable moiety is a bindable label or bindable moiety, which refers to an atom, molecule or composition, wherein the presence of the atom, molecule or composition can be detected as a result of the label or moiety binding to another atom, molecule or composition. Exemplary detectable labels include, for example, metals such as colloidal gold, iron, gadolinium, and gallium-67, fluorescent moieties, and radionuclides. Exemplary fluorescent moieties and radionuclides are provided elsewhere herein.

[0158] As used herein, a radionuclide, a radioisotope or radioactive isotope is used interchangeably to refer to an atom with an unstable nucleus. The nucleus is characterized by excess energy which is available to be imparted either to a newly-created radiation particle within the nucleus, or else to an atomic electron. The radionuclide, in this process, undergoes radioactive decay, and emits a gamma ray and/or subatomic particles. Such emissions can be detected in vivo by method such as, but not limited to, positron emission tomography (PET), single-photon emission computed tomography (SPECT) or planar gamma imaging. Radioisotopes can occur naturally, but also can be artificially produced. Exemplary radionuclides for use in in vivo imaging include, but are not limited to, ¹¹C, ¹¹F, ¹³C, ¹³N, ¹⁵N, ¹⁵0, ¹⁸F, ¹⁹F, ³²P, ⁵²Fe, ⁵¹Cr, ⁵⁵Co, ⁵⁵Fe, ⁵⁷Co, ⁵⁸Co, ⁵⁷Ni, ⁵⁹Fe ⁶⁰Co, ⁶⁴Cu, ⁶⁷Ga, ⁶⁸Ga, ⁶⁰Cu(II), ⁶⁷Cu(i), ⁹⁹Tc, ⁹⁰Y, ⁹⁹Tc, ¹⁰³Pd, ¹⁰⁶Ru, ¹¹¹In, ¹¹⁷Lu, ¹²³I, ¹²⁵I, ¹²⁴I, ¹³¹I, ¹³⁷Cs, ¹⁵³Gd, ¹⁵³Sm, ¹⁸⁶Re, ¹⁸⁸Re, ¹⁹²Ir, ¹⁹⁸Au, ²¹¹At, ²¹²Bi, ²¹³Bi and ²⁴¹Am. Radioisotopes can be incorporated into or attached to a compound, such as a metabolic compound. Exemplary radionuclides that can be incorporated or linked to a metabolic compound, such as nucleoside analog, include, but are not limited to, ¹²³I, ¹²⁴I, ¹²⁵I, ¹³¹I, ¹⁸F, ¹⁹F, ¹¹C, ¹³C, ¹⁴C, ⁷⁵Br, ⁷⁶Br, and ³H.

[0159] As used herein, magnetic resonance imaging (MRI) refers to the use of a nuclear magnetic resonance spectrometer to produce electronic images of specific atoms and molecular structures in solids, especially human cells, tissues, and organs. MRI is non-invasive diagnostic technique that uses nuclear magnetic resonance to produce cross-sectional images of organs and other internal body structures. The subject lies inside a large, hollow cylinder containing a strong electromagnet, which causes the nuclei of certain atoms in the body (such as, for example, ¹H, ¹³C and ¹⁹F) to align magnetically. The subject is then subjected to radio waves, which cause the aligned nuclei to flip; when the radio waves are withdrawn the nuclei return to their original positions, emitting radio waves that are then detected by a receiver and translated into a two-dimensional picture by computer. For some MRI procedures, contrast agents such as gadolinium are used to increase the accuracy of the images.

[0160] As used herein, an X-ray refers to a relatively high-energy photon, or a stream of such photons, having a wavelength in the approximate range from 0.01 to 10 nanometers. X-rays also refer to photographs taken with x-rays.

[0161] As used herein, a compound conjugated to a moiety refers to a complex that includes a compound bound to a moiety, where the binding between the compound and the moiety can arise from one or more covalent bonds or non-covalent interactions such as hydrogen bonds, or electrostatic interactions. A conjugate also can include a linker that connects the compound to the moiety. Exemplary compounds include, but are not limited to, nanoparticles and siderophores. Exemplary moieties, include, but are not limited to, detectable moieties and therapeutic agents.

[0162] As used herein, “modulate” and “modulation” or “alter” refer to a change of an activity of a molecule, such as a protein. Exemplary activities include, but are not limited to, biological activities, such as signal transduction. Modulation can include an increase in the activity (i.e., up-regulation or agonist activity), a decrease in activity (i.e., down-regulation or inhibition) or any other alteration in an activity (such as a change in periodicity, frequency, duration, kinetics or other parameter). Modulation can be context dependent and typically modulation is compared to a designated state, for example, the wildtype protein, the protein in a constitutive state, or the protein as expressed in a designated cell type or condition.

[0163] As used herein, an agent or compound that modulates the activity of a protein or expression of a gene or nucleic acid either decreases or increases or otherwise alters the activity of the protein or, in some manner, up- or down-regulates or otherwise alters expression of the nucleic acid in a cell.

[0164] As used herein, “nucleic acids” include DNA, RNA and analogs thereof, including peptide nucleic acids (PNA) and mixtures thereof. Nucleic acids can be single or double-stranded. Nucleic acids can encode gene products, such as, for example, polypeptides, regulatory RNAs, microRNAs, siRNAs and functional RNAs.

[0165] As used herein, a sequence complementary to at least a portion of an RNA, with reference to antisense oligonucleotides, means a sequence of nucleotides having sufficient complementarity to be able to hybridize with the RNA, generally under moderate or high stringency conditions, forming a stable duplex; in the case of double-stranded antisense nucleic acids, a single strand of the duplex DNA (i.e., dsRNA) can thus be assayed, or triplex formation can be assayed. The ability to hybridize depends on the degree of complementarity and the length of the antisense nucleic acid. Generally, the longer the hybridizing nucleic acid, the more base mismatches with an encoding RNA it can contain and still form a stable duplex (or triplex, as the case can be). One skilled in the art can ascertain a tolerable degree of mismatch by use of standard procedures to determine the melting point of the hybridized complex.

[0166] As used herein, a peptide refers to a polypeptide that is greater than or equal to 2 amino acids in length, and less than or equal to 40 amino acids in length.

[0167] As used herein, the amino acids which occur in the various sequences of amino acids provided herein are identified according to their known, three-letter or one-letter abbreviations (Table 1). The nucleotides which occur in the various nucleic acid fragments are designated with the standard single-letter designations used routinely in the art.

[0168] As used herein, an “amino acid” is an organic compound containing an amino group and a carboxylic acid group. A polypeptide contains two or more amino acids. For purposes herein, amino acids include the twenty naturally-occurring amino acids, non-natural amino acids and amino acid analogs (i.e., amino acids wherein the α-carbon has a side chain).

[0169] As used herein, “amino acid residue” refers to an amino acid formed upon chemical digestion (hydrolysis) of a polypeptide at its peptide linkages. The amino acid residues described herein are presumed to be in the “L” isomeric form. Residues in the “D” isomeric form, which are so designated, can be substituted for any L-amino acid residue as long as the desired functional property is retained by the polypeptide. NH2 refers to the free amino group present at the amino terminus of a polypeptide. COOH refers to the free carboxy group present at the carboxyl terminus of a polypeptide. In keeping with standard polypeptide nomenclature described in J. Biol. Chem., 243: 3557-3559 (1968), and adopted 37 C.F.R. §§1.821-1.822, abbreviations for amino acid residues are shown in Table 1:

TABLE 1
Table of Amino Acid Correspondence

SYMBOL

| 1-Letter | 3-Letter | AMINO ACID |
|---|---|---|
| Y | Tyr | Tyrosine |
| G | Gly | Glycine |
| F | Phe | Phenylalanine |
| M | Met | Methionine |
| A | Ala | Alanine |
| S | Ser | Serine |
| I | Ile | Isoleucine |
| L | Leu | Leucine |
| T | Thr | Threonine |
| V | Val | Valine |
| P | Pro | Proline |
| K | Lys | Lysine |
| H | His | Histidine |
| Q | Gln | Glutamine |
| E | Glu | Glutamic acid |
| Z | Glx | Glu and/or Gln |
| W | Trp | Tryptophan |
| R | Arg | Arginine |
| D | Asp | Aspartic acid |
| N | Asn | Asparagine |
| B | Asx | Asn and/or Asp |
| C | Cys | Cysteine |
| X | Xaa | Unknown or other |

[0170] All amino acid residue sequences represented herein by formulae have a left to right orientation in the conventional direction of amino-terminus to carboxyl-terminus. In addition, the phrase “amino acid residue” is defined to include the amino acids listed in the Table of Correspondence (Table 1) and modified and unusual amino acids, such as those referred to in 37 C.F.R. §§1.821-1.822, and incorporated herein by reference. Furthermore, a dash at the beginning or end of an amino acid residue sequence indicates a peptide bond to a further sequence of one or more amino acid residues, to an amino-terminal group such as NH₂ or to a carboxyl-terminal group such as COOH.

[0171] As used herein, the “naturally occurring α-amino acids” are the residues of those 20 α-amino acids found in nature which are incorporated into protein by the specific recognition of the charged tRNA molecule with its cognate mRNA codon in humans. Non-naturally occurring amino acids thus include, for example, amino acids or analogs of amino acids other than the 20 naturally-occurring amino acids and include, but are not limited to, the D-stereoisomers of amino acids. Exemplary non-natural amino acids are described herein and are known to those of skill in the art.

[0172] As used herein, the term polynucleotide means a single- or double-stranded polymer of deoxyribonucleotides or ribonucleotide bases read from the 5′ to the 3′ end. Polynucleotides include RNA and DNA, and can be isolated from natural sources, synthesized in vitro, or prepared from a combination of natural and synthetic molecules. The length of a polynucleotide molecule is given herein in terms of nucleotides (abbreviated “nt”) or base pairs (abbreviated “bp”). The term nucleotides is used for single- and double-stranded molecules where the context permits. When the term is applied to double-stranded molecules it is used to denote overall length and will be understood to be equivalent to the term base pairs. It will be recognized by those skilled in the art that the two strands of a double-stranded polynucleotide can differ slightly in length and that the ends thereof can be staggered; thus all nucleotides within a double-stranded polynucleotide molecule may not be paired. Such unpaired ends will, in general, not exceed 20 nucleotides in length.

[0173] As used herein, “similarity” between two proteins or nucleic acids refers to the relatedness between the sequence of amino acids of the proteins or the nucleotide sequences of the nucleic acids. Similarity can be based on the degree of identity and/or homology of sequences of residues and the residues contained therein. Methods for assessing the degree of similarity between proteins or nucleic acids are known to those of skill in the art. For example, in one method of assessing sequence similarity, two amino acid or nucleotide sequences are aligned in a manner that yields a maximal level of identity between the sequences. “Identity” refers to the extent to which the amino acid or nucleotide sequences are invariant. Alignment of amino acid sequences, and to some extent nucleotide sequences, also can take into account conservative differences and/or frequent substitutions in amino acids (or nucleotides). Conservative differences are those that preserve the physico-chemical properties of the residues involved. Alignments can be global (alignment of the compared sequences over the entire length of the sequences and including all residues) or local (the alignment of a portion of the sequences that includes only the most similar region or regions).

[0174] “Identity” per se has an art-recognized meaning and can be calculated using published techniques. (See, e.g. Computational Molecular Biology, Lesk, A. M., ed., Oxford University Press, New York, 1988; Biocomputing: Informatics and Genome Projects, Smith, D. W., ed., Academic Press, New York, 1993; Computer Analysis of Sequence Data, Part I, Griffin, A. M., and Griffin, H. G., eds., Humana Press, New Jersey, 1994; Sequence Analysis in Molecular Biology, von Heinje, G., Academic Press, 1987; and Sequence Analysis Primer, Gribskov, M. and Devereux, J., eds., M Stockton Press, New York, 1991). While there exists a number of methods to measure identity between two polynucleotide or polypeptides, the term “identity” is well known to skilled artisans (Carrillo, H. and Lipton, D., SIAM J Applied Math 48:1073 (1988)).

[0175] As used herein, homologous (with respect to nucleic acid and/or amino acid sequences) means about greater than or equal to 25% sequence homology, typically greater than or equal to 25%, 40%, 50%, 60%, 70%, 80%, 85%, 90% or 95% sequence homology; the precise percentage can be specified if necessary. For purposes herein the terms “homology” and “identity” are often used interchangeably, unless otherwise indicated. In general, for determination of the percentage homology or identity, sequences are aligned so that the highest order match is obtained (see, e.g.: Computational Molecular Biology, Lesk, A. M., ed., Oxford University Press, New York, 1988; Biocomputing: Informatics and Genome Projects, Smith, D. W., ed., Academic Press, New York, 1993; Computer Analysis of Sequence Data, Part I, Griffin, A. M., and Griffin, H. G., eds., Humana Press, New Jersey, 1994; Sequence Analysis in Molecular Biology, von Heinje, G., Academic Press, 1987; and Sequence Analysis Primer, Gribskov, M. and Devereux, J., eds., M Stockton Press, New York, 1991; Carrillo and Lipman (1988) SIAM J Applied Math 48:1073). By sequence homology, the number of conserved amino acids is determined by standard alignment algorithms programs, and can be used with default gap penalties established by each supplier. Substantially homologous nucleic acid molecules hybridize typically at moderate stringency or at high stringency all along the length of the nucleic acid of interest. Also contemplated are nucleic acid molecules that contain degenerate codons in place of codons in the hybridizing nucleic acid molecule.

[0176] Whether any two molecules have nucleotide sequences or amino acid sequences that are at least 60%, 70%, 80%, 85%, 90%, 95%, 96%, 97%, 98% or 99% “identical” or “homologous” can be determined using known computer algorithms such as the “FASTA” program, using for example, the default parameters as in Pearson et al. (1988) Proc. Natl. Acad. Sci. USA 85:2444 (other programs include the GCG program package (Devereux, J., et al. Nucleic Acids Research 12(I):387 (1984)), BLASTP, BLASTN, FASTA (Altschul, S. F., et al. J Mol Biol 215:403 (1990)); Guide to Huge Computers, Martin J. Bishop, ed., Academic Press, San Diego, 1994, and Carrillo et al. (1988) SIAM J Applied Math 48:1073). For example, the BLAST function of the National Center for Biotechnology Information database can be used to determine identity. Other commercially or publicly available programs include, DNAStar “MegAlign” program (Madison, Wis.) and the University of Wisconsin Genetics Computer Group (UWG) “Gap” program (Madison Wis.). Percent homology or identity of proteins and/or nucleic acid molecules can be determined, for example, by comparing sequence information using a GAP computer program (e.g., Needleman et al. (1970) J. Mol. Biol. 48:443, as revised by Smith and Waterman ((1981) Adv. Appl. Math. 2:482). Briefly, the GAP program defines similarity as the number of aligned symbols (i.e., nucleotides or amino acids), which are similar, divided by the total number of symbols in the shorter of the two sequences. Default parameters for the GAP program can include: (1) a unary comparison matrix (containing a value of 1 for identities and 0 for non-identities) and the weighted comparison matrix of Gribskov et al. (1986) Nucl. Acids Res. 14:6745, as described by Schwartz and Dayhoff, eds., ATLAS OF PROTEIN SEQUENCE AND STRUCTURE, National Biomedical Research Foundation, pp. 353-358 (1979); (2) a penalty of 3.0 for each gap and an additional 0.10 penalty for each symbol in each gap; and (3) no penalty for end gaps.

[0177] Therefore, as used herein, the term “identity” or “homology” represents a comparison between a test and a reference polypeptide or polynucleotide. As used herein, the term at least “90% identical to” refers to percent identities from 90 to 99.99 relative to the reference nucleic acid or amino acid sequence of the polypeptide. Identity at a level of 90% or more is indicative of the fact that, assuming for exemplification purposes a test and reference polypeptide length of 100 amino acids are compared. No more than 10% (i.e., 10 out of 100) of the amino acids in the test polypeptide differs from that of the reference polypeptide. Similar comparisons can be made between test and reference polynucleotides. Such differences can be represented as point mutations randomly distributed over the entire length of a polypeptide or they can be clustered in one or more locations of varying length up to the maximum allowable, e.g. 10/100 amino acid difference (approximately 90% identity). Differences are defined as nucleic acid or amino acid substitutions, insertions or deletions. At the level of homologies or identities above about 85-90%, the result is independent of the program and gap parameters set; such high levels of identity can be assessed readily, often by manual alignment without relying on software.

[0178] As used herein, an aligned sequence refers to the use of homology (similarity and/or identity) to align corresponding positions in a sequence of nucleotides or amino acids. Typically, two or more sequences that are related by 50% or more identity are aligned. An aligned set of sequences refers to 2 or more sequences that are aligned at corresponding positions and can include aligning sequences derived from RNAs, such as ESTs and other cDNAs, aligned with genomic DNA sequence.

[0179] As used herein, “primer” refers to a nucleic acid molecule that can act as a point of initiation of template-directed DNA synthesis under appropriate conditions (e.g., in the presence of four different nucleoside triphosphates and a polymerization agent, such as DNA polymerase, RNA polymerase or reverse transcriptase) in an appropriate buffer and at a suitable temperature. It will be appreciated that certain nucleic acid molecules can serve as a “probe” and as a “primer.” A primer, however, has a 3′ hydroxyl group for extension. A primer can be used in a variety of methods, including, for example, polymerase chain reaction (PCR), reverse-transcriptase (RT)-PCR, RNA PCR, LCR, multiplex PCR, panhandle PCR, capture PCR, expression PCR, 3′ and 5′ RACE, in situ PCR, ligation-mediated PCR and other amplification protocols.

[0180] As used herein, “primer pair” refers to a set of primers that includes a 5′ (upstream) primer that hybridizes with the 5′ end of a sequence to be amplified (e.g. by PCR) and a 3′ (downstream) primer that hybridizes with the complement of the 3′ end of the sequence to be amplified.

[0181] As used herein, “specifically hybridizes” refers to annealing, by complementary base-pairing, of a nucleic acid molecule (e.g. an oligonucleotide) to a target nucleic acid molecule. Those of skill in the art are familiar with in vitro and in vivo parameters that affect specific hybridization, such as length and composition of the particular molecule. Parameters particularly relevant to in vitro hybridization further include annealing and washing temperature, buffer composition and salt concentration. Exemplary washing conditions for removing non-specifically bound nucleic acid molecules at high stringency are 0.1×SSPE, 0.1% SDS, 65° C., and at medium stringency are 0.2×SSPE, 0.1% SDS, 50° C. Equivalent stringency conditions are known in the art. The skilled person can readily adjust these parameters to achieve specific hybridization of a nucleic acid molecule to a target nucleic acid molecule appropriate for a particular application. Complementary, when referring to two nucleotide sequences, means that the two sequences of nucleotides are capable of hybridizing, typically with less than 25%, 15% or 5% mismatches between opposed nucleotides. If necessary, the percentage of complementarity will be specified. Typically the two molecules are selected such that they will hybridize under conditions of high stringency.

[0182] As used herein, substantially identical to a product means sufficiently similar so that the property of interest is sufficiently unchanged so that the substantially identical product can be used in place of the product.

[0183] As used herein, it also is understood that the terms “substantially identical” or “similar” varies with the context as understood by those skilled in the relevant art.

[0184] As used herein, an allelic variant or allelic variation references any of two or more alternative forms of a gene occupying the same chromosomal locus. Allelic variation arises naturally through mutation, and can result in phenotypic polymorphism within populations. Gene mutations can be silent (no change in the encoded polypeptide) or can encode polypeptides having altered amino acid sequence. The term “allelic variant” also is used herein to denote a protein encoded by an allelic variant of a gene. Typically the reference form of the gene encodes a wildtype form and/or predominant form of a polypeptide from a population or single reference member of a species. Typically, allelic variants, which include variants between and among species typically have at least 80%, 90% or greater amino acid identity with a wildtype and/or predominant form from the same species; the degree of identity depends upon the gene and whether comparison is interspecies or intraspecies. Generally, intraspecies allelic variants have at least about 80%, 85%, 90% or 95% identity or greater with a wildtype and/or predominant form, including 96%, 97%, 98%, 99% or greater identity with a wildtype and/or predominant form of a polypeptide. Reference to an allelic variant herein generally refers to variations n proteins among members of the same species.

[0185] As used herein, “allele,” which is used interchangeably herein with “allelic variant” refers to alternative forms of a gene or portions thereof. Alleles occupy the same locus or position on homologous chromosomes. When a subject has two identical alleles of a gene, the subject is said to be homozygous for that gene or allele. When a subject has two different alleles of a gene, the subject is said to be heterozygous for the gene. Alleles of a specific gene can differ from each other in a single nucleotide or several nucleotides, and can include modifications such as substitutions, deletions and insertions of nucleotides. An allele of a gene also can be a form of a gene containing a mutation.

[0186] As used herein, species variants refer to variants in polypeptides among different species, including different mammalian species, such as mouse and human. Generally, species variants have 70%, 75%, 80%, 85%, 90%, 91%, 92%, 93%, 94%, 95%, 96%, 97%, 98% or sequence identity. Corresponding residues between and among species variants can be determined by comparing and aligning sequences to maximize the number of matching nucleotides or residues, for example, such that identity between the sequences is equal to or greater than 95%, equal to or greater than 96%, equal to or greater than 97%, equal to or greater than 98% or equal to greater than 99%. The position of interest is then given the number assigned in the reference nucleic acid molecule. Alignment can be effected manually or by eye, particularly, where sequence identity is greater than 80%.

[0187] As used herein, a human protein is one encoded by a nucleic acid molecule, such as DNA, present in the genome of a human, including all allelic variants and conservative variations thereof. A variant or modification of a protein is a human protein if the modification is based on the wildtype or prominent sequence of a human protein.

[0188] As used herein, a splice variant refers to a variant produced by differential processing of a primary transcript of genomic DNA that results in more than one type of mRNA.

[0189] As used herein, modification is in reference to modification of a sequence of amino acids of a polypeptide or a sequence of nucleotides in a nucleic acid molecule and includes deletions, insertions, and replacements (e.g. substitutions) of amino acids and nucleotides, respectively. Exemplary of modifications are amino acid substitutions. An amino-acid substituted polypeptide can exhibit 65%, 70%, 80%, 85%, 90%, 91%, 92%, 93%, 94%, 95%, 96%, 97%, 98% or more sequence identity to a polypeptide not containing the amino acid substitutions. Amino acid substitutions can be conservative or non-conservative. Generally, any modification to a polypeptide retains an activity of the polypeptide. Methods of modifying a polypeptide are routine to those of skill in the art, such as by using recombinant DNA methodologies.

[0190] As used herein, suitable conservative substitutions of amino acids are known to those of skill in the art and can be made generally without altering the biological activity of the resulting molecule. Those of skill in the art recognize that, in general, single amino acid substitutions in non-essential regions of a polypeptide do not substantially alter biological activity (see, e.g., Watson et al. Molecular Biology of the Gene, 4th Edition, 1987, The Benjamin/Cummings Pub. co., p. 224). Such substitutions can be made in accordance with those set forth in Table 2 as follows:

TABLE 2
Table of Exemplary Conservative Amino Acid Substitutions

| Original residue | Exemplary Conservative Substitution |
|---|---|
| Ala (A) | Gly; Ser |
| Arg (R) | Lys |
| Asn (N) | Gln; His |
| Cys (C) | Ser |
| Gln (Q) | Asn |
| Glu (E) | Asp |
| Gly (G) | Ala; Pro |
| His (H) | Asn; Gln |
| Ile (I) | Leu; Val |
| Leu (L) | Ile; Val |
| Lys (K) | Arg; Gln; Glu |
| Met (M) | Leu; Tyr; Ile |
| Phe (F) | Met; Leu; Tyr |
| Ser (S) | Thr |
| Thr (T) | Ser |
| Trp (W) | Tyr |
| Tyr (Y) | Trp; Phe |
| Val (V) | Ile; Leu |

[0191] Other substitutions also are permissible and can be determined empirically or in accord with known conservative substitutions.

[0192] As used herein, the term promoter means a portion of a gene containing DNA sequences that provide for the binding of RNA polymerase and initiation of transcription. Promoter sequences are commonly, but not always, found in the 5′ non-coding region of genes.

[0193] As used herein, isolated or purified polypeptide or protein or biologically-active portion thereof is substantially free of cellular material or other contaminating proteins from the cell or tissue from which the protein is derived, or substantially free from chemical precursors or other chemicals when chemically synthesized. Preparations can be determined to be substantially free if they appear free of readily detectable impurities as determined by standard methods of analysis, such as thin layer chromatography (TLC), gel electrophoresis and high performance liquid chromatography (HPLC), used by those of skill in the art to assess such purity, or sufficiently pure such that further purification would not detectably alter the physical and chemical properties, such as enzymatic and biological activities, of the substance. Methods for purification of the compounds to produce substantially chemically pure compounds are known to those of skill in the art. A substantially chemically pure compound, however, can be a mixture of stereoisomers. In such instances, further purification might increase the specific activity of the compound.

[0194] Hence, reference to a substantially purified polypeptide, refers to preparations of proteins that are substantially free of cellular material includes preparations of proteins in which the protein is separated from cellular components of the cells from which it is isolated or recombinantly-produced. In one example, the term substantially free of cellular material includes preparations of enzyme proteins having less that about 30% (by dry weight) of non-enzyme proteins (also referred to herein as a contaminating protein), generally less than about 20% of non-enzyme proteins or 10% of non-enzyme proteins or less that about 5% of non-enzyme proteins. When the enzyme protein is recombinantly produced, it also is substantially free of culture medium, i.e., culture medium represents less than about or at 20%, 10% or 5% of the volume of the enzyme protein preparation.

[0195] As used herein, the term substantially free of chemical precursors or other chemicals includes preparations of enzyme proteins in which the protein is separated from chemical precursors or other chemicals that are involved in the synthesis of the protein. The term includes preparations of enzyme proteins having less than about 30% (by dry weight), 20%, 10%, 5% or less of chemical precursors or non-enzyme chemicals or components.

[0196] As used herein, synthetic, with reference to, for example, a synthetic nucleic acid molecule or a synthetic gene or a synthetic peptide refers to a nucleic acid molecule or polypeptide molecule that is produced by recombinant methods and/or by chemical synthesis methods.

[0197] As used herein, production by recombinant means or using recombinant DNA methods means the use of the well known methods of molecular biology for expressing proteins encoded by cloned DNA.

[0198] As used herein, a DNA construct is a single- or double-stranded, linear or circular DNA molecule that contains segments of DNA combined and juxtaposed in a manner not found in nature. DNA constructs exist as a result of human manipulation, and include clones and other copies of manipulated molecules.

[0199] As used herein, a DNA segment is a portion of a larger DNA molecule having specified attributes. For example, a DNA segment encoding a specified polypeptide is a portion of a longer DNA molecule, such as a plasmid or plasmid fragment, which, when read from the 5′ to 3′ direction, encodes the sequence of amino acids of the specified polypeptide.

[0200] As used herein, vector (or plasmid) refers to a nucleic acid construct that contains discrete elements that are used to introduce heterologous nucleic acid into cells for either expression of the nucleic acid or replication thereof. The vectors typically remain episomal, but can be designed to effect stable integration of a gene or portion thereof into a chromosome of the genome. Selection and use of such vectors are well known to those of skill in the art.

[0201] As used herein, an expression vector includes vectors capable of expressing DNA that is operatively linked with regulatory sequences, such as promoter regions, that are capable of effecting expression of such DNA fragments. Such additional segments can include promoter and terminator sequences, and optionally can include one or more origins of replication, one or more selectable markers, an enhancer, a polyadenylation signal. Expression vectors are generally derived from plasmid or viral DNA, or can contain elements of both. Thus, an expression vector refers to a recombinant DNA or RNA construct, such as a plasmid, a phage, recombinant virus or other vector that, upon introduction into an appropriate host cell, results in expression of the cloned DNA. Appropriate expression vectors are well known to those of skill in the art and include those that are replicable in eukaryotic cells and/or prokaryotic cells and those that remain episomal or those which integrate into the host cell genome.

[0202] As used herein, the term “viral vector” is used according to its art-recognized meaning. It refers to a nucleic acid vector that includes at least one element of viral origin and can be packaged into a viral vector particle. The viral vector particles can be used for the purpose of transferring DNA, RNA or other nucleic acids into cells either in vitro or in vivo. Viral vectors include, but are not limited to, poxvirus vectors (e.g., vaccinia vectors), retroviral vectors, lentivirus vectors, herpes virus vectors (e.g., HSV), baculovirus vectors, cytomegalovirus (CMV) vectors, papillomavirus vectors, simian virus (SV40) vectors, semliki forest virus vectors, phage vectors, adenoviral vectors and adeno-associated viral (AAV) vectors.

[0203] As used herein equivalent, when referring to two sequences of nucleic acids, means that the two sequences in question encode the same sequence of amino acids or equivalent proteins. When equivalent is used in referring to two proteins or peptides, it means that the two proteins or peptides have substantially the same amino acid sequence with only amino acid substitutions that do not substantially alter the activity or function of the protein or peptide. When equivalent refers to a property, the property does not need to be present to the same extent (e.g., two peptides can exhibit different rates of the same type of enzymatic activity), but the activities are usually substantially the same.

[0204] As used herein, a composition refers to any mixture. It can be a solution, suspension, liquid, powder, paste, aqueous, non-aqueous or any combination thereof.

[0205] As used herein, a combination refers to any association between or among two or more items. The combination can be two or more separate items, such as two compositions or two collections, can be a mixture thereof, such as a single mixture of the two or more items, or any variation thereof. The elements of a combination are generally functionally associated or related.

[0206] As used herein, a kit is a packaged combination, optionally, including instructions for use of the combination and/or other reactions and components for such use.

[0207] As used herein, the singular forms “a,” “an” and “the” include plural referents unless the context clearly dictates otherwise.

[0208] As used herein, ranges and amounts can be expressed as “about” or “approximately” a particular value or range. “About” or “approximately” also includes the exact amount. Hence, “about 5 milliliters” means “about 5 milliliters” and also “5 milliliters.” Generally “about” includes an amount that would be expected to be within experimental error.

[0209] As used herein, “about the same” means within an amount that one of skill in the art would consider to be the same or to be within an acceptable range of error. For example, typically, for pharmaceutical compositions, within at least 1%, 2%, 3%, 4%, 5% or 10% is considered about the same. Such amount can vary depending upon the tolerance for variation in the particular composition by subjects.

[0210] As used herein, “optional” or “optionally” means that the subsequently described event or circumstance does or does not occur, and that the description includes instances where said event or circumstance occurs and instances where it does not.

[0211] As used herein, the abbreviations for any protective groups, amino acids and other compounds, are, unless indicated otherwise, in accord with their common usage, recognized abbreviations, or the IUPAC-IUB Commission on Biochemical Nomenclature (see, (1972) Biochem. 11:1726).

### B. OVERVIEW

[0212] Provided herein are methods of treatment with antibiotics to increase the therapeutic efficacy of viral therapy, such as oncolytic viral therapy and gene therapy.

[0213] The methods employ antibiotics to deplete commensal gut bacteria. It is shown herein that doing so improves viral therapy.

[0214] 1. Gut Bacteria and Immune Response

[0215] Commensal intestinal bacteria play a role in modulating'immune responses against bacterial or viral infections (see, e.g., Macpherson and Harris, (2004) Nat Rev Immunol, 4(6):478-785) There are estimated 100 trillion bacteria in the human intestine. Commensal gut bacteria contribute to the development and regulation of the mammalian immune system (Hill et al., (2010) Annu Rev Immunol, 28:623-667). Depletion of gut bacteria by antibiotics has been reported to impair the normal development and function of nature killer cells (NK), dendritic cells (Dc) and macrophages (Mac) when exposed to pathogens (Ganal et al., (2012) Immunity 37:171-186). The gut bacterial population was found to participate in regulating the generation of virus-specific CD4 and CD8 T cells and antibody responses against respiratory influenza virus infection (Ichinohe et al. (2011) Proc. Natl. Acad. Sci. U.S.A. 108(13):5354-5359). In contrast, other studies have shown that viruses are depend upon commensal bacteria for infection and replication (Wilks and Golovkina (2012) PLoS Pathogens 8:e1002681). For example, depletion of gut bacteria prevents mouse mammary tumor virus (MMTV) infection (Kane et al. (2011) Nature 334:245-249) and intestinal bacteria promote replication and systemic pathogenesis of poliovirus and reovirus (Kuss et al. (2011) Nature 334:249-252).

[0216] 2. Viral Therapy

[0217] Viral therapy includes, for example, oncolytic virotherapy for the treatment of cancer and tumors and gene therapy, in which viruses are used to deliver the DNA into cells for treatment of various diseases and conditions. Among the challenges presented by viral therapy is the systemic delivery of virus to target tumors. As shown herein, administration of antimicrobial agents that eliminate commensal gut microbes improve the efficacy of oncolytic viral therapy.

[0218] Among the methods provided herein are methods for reducing immune response to viruses. The methods provided herein temporarily weaken the immune response at time of virus infection, thereby improving the efficacy of virotherapy. As shown herein, administration of antimicrobial agents that eliminate commensal gut microbes improve the efficacy of viral therapy, including oncolytic viral therapy for treatment of tumors, cancers and metastases.

[0219] 3. Methods of Treatment with Antibiotics Increase the Therapeutic Efficacy of Viral Therapy

[0220] As described herein and in the examples provided herein, administration of antibiotics that eliminate commensal gut microbes improves the efficacy of viral therapy, such as oncolytic viral therapy. This is exemplified herein with a therapeutic vaccinia virus. In a mouse xenograft model of human lung cancer, treatment with antibiotics and vaccinia viruses resulted in increased viral replication in tumors but not in healthy organs, increased survival rate and reduced weight loss. In human cancer patients, treatment of cancer patients with antibiotics and the LIVP strain vaccinia virus designated GLV-1h68 resulted in prolonged viral efficacy. For example, a prolonged inherent (in situ) intraperitoneal production of progeny viral particles was observed for up to 22 days when the patients were treated with antibiotics as opposed to only 8-12 days when the patient did not receive antibiotic therapy. GLV-1h68 contains a reporter gene encoding β-glucuronidase which can be used to monitor viral activity. β-Glucuronidase activity was observed 59 days after virus administration in the patient receiving antibiotics but was only observed after 9 days in the patient that only was administered virus. Further, the patient receiving both antibiotics and viral therapy had decreased numbers of cells/ascites and increased LDH levels indicating cell lysis. Finally, the a patient receiving both viral therapy and antibiotics had a prolonged inflammatory response, indicated by fever, CRP levels and leukocyte counts but lymphocyte counts were consistently lower in the patient receiving antibiotics.

### C. ANTIBIOTICS

[0221] Any antibiotic effective for inhibiting the growth of or killing gut bacteria can be used in the methods provided herein. The antibiotics are not chemotherapeutic antibiotics. Antibiotics for use in the methods provided herein, include, but are not limited to, penicillins such as penicillin, benzylpenicillin (penicillin G), procaine benzylpenicillin (procaine penicillin), benzathine benzylpenicillin (benzathine penicillin), phenoxymethylpenicillin (penicillin V), amoxicillin, ampicillin, azlocillin, carbenicillin, cloxacillin, dicloxacillin, flucloxacillin, mezlocillin, methicillin, nafcillin, oxacillin, temocillin and ticarcillin, penicillin combinations such as amoxicillin/clavulanate, ampicillin/sulbactam, piperacillin/tazobactam and ticarcillin/clavulanate, tetracyclines such as demeclocycline, doxycycline, minocycline, oxytetracycline and tetracycline, β-lactam antibiotics (Cephems) including cephalosporins, cephamycins and carbapenems such as cefacetrile, cefadroxil, cephalexin, cefaloglycin, cefalonium, cefaloridine, cefalotin, cefapirin, cefatrizine, cefazaflur, cefazedone, cefazolin, cefradine, cefroxadine, ceftezole, cefaclor, cefonicid, cefprozil, cefuroxime, cefuzonam, cefmetazole, cefotetan, cefoxitin, loracarbef, cefbuperazone, cefmetazole, cefminox, cefotetan, cefoxitin, cefotiam, cefcapene, cefdaloxime, cefdinir, cefditoren, cefetamet, cefixime, cefmenoxime, cefodizime, cefotaxime, cefovecin, cefpimizole, cefpodoxime, cefteram, ceftibuten, ceftiofur, ceftiolene, ceftizoxime, ceftriaxone, cefoperazone, ceftazidime, latamoxef, cefclidine, cefepime, cefluprenam, cefoselis, cefozopran, cefpirome, cefquinome, flomoxef, ceftobiprole, ceftaroline, cefaloram, cefaparole, cefcanel, cefedrolor, cefempidone, cefetrizole, cefivitril, cefmepidium, cefoxazole, cefrotil, cefsumide, ceftioxide and cefuracetime, ertapenem, doripenem, imipenem, imipenem/cilastatin, meropenem, panipenem/betamipron, biapenem, razupenem and tebipenem, carbacephems such as loracarbef, glycopeptides such as teicoplanin, vancomycin, bleomycin, ramoplanin, decaplanin and telavancin, aminoglycosides such as streptomycin, gentamicin, kanamycin, neomycin, netilmicin, tobramycin, spectinomycin, paromomycin, framycetin, ribostamycin, amikacin, arbekacin, bekanamycin, dibekacin, rhodostreptomycin, apramycin, hygromycin B, paromomycin sulfate, sisomicin, isepamicin, verdamicin and astromicin, ansamycins, such as geldanamycin, herbimycin and rifaximin, macrolides such as azithromycin, clarithromycin, dirithromycin, erythromycin, roxithromycin, telithromycin, carbomycin A, josamycin, kitasamycin, midecamycin, midecamycin acetate, oleandomycin, solithromycin, spiramycin, troleandomycin, tylosin and tylocine, ketolides such as telithromycin, cethromycin, solithromycin, spiramycin, ansamycin, oleandomycin, carbomycin and tylosin, monobactams such as aztreonam, nitrofurans such as furazolidone and nitrofurantoin, sulfonamides such as mafenide, sulfamethoxazole, sulfisomidine, sulfadiazine, silver sulfadiazine, sulfamethoxine, sulfamethizole, sulfanilamide, sulfasalazine, sulfisoxazole, trimethoprim-sulfamethoxazole, sulfonamidochrysoidine, sulfacetamide, sulfadoxine and dichlorphenamide, lincosamides such as clindamycin and lincomycin, lipopeptides such as daptomycin, polypeptides such as bacitracin, colistin and polymyxin B, quinolones such as moxifloxacin, ciprofloxacin, levofloxacin, cinoxacin, nalidixic acid, oxolinic acid, piromidic acid, pipemidic acid, rosoxacin, enoxacin, fleroxacin, lomefloxacin, nadifloxacin, norfloxacin, ofloxacin, pefloxacin, rufloxacin, balofloxacin, grepafloxacin, pazufloxacin, sparfloxacin, tosufloxacin, clinafloxacin, gatifloxacin, gemifloxacin, moxifloxacin, sitafloxacin, trovafloxacin and prulifloxacin, drugs against mycobacteria such as clofazimine, dapsone, capreomycin, cycloserine, ethambutol, ethionamide, isoniazid, pyrazinamide, rifampicin, rifabutin, rifapentine and streptomycin, oxazolidinones such as linezolid, posizolid, radezolid, cycloserine and torezolid, and other antibiotics such as arsphenamine, chloramphenicol, fosfomycin, fusidic acid, metronidazole, tazobactam, mupirocin, platensimycin, quinupristin/dalfopristin, thiamphenicol, tigecycline, tinidazole and trimethoprim.

[0222] Exemplary antibiotics for use in the methods provided herein include, but are not limited to, penicillin, streptomycin, ampicillin, neomycin, metronidazole, vancomycin, tazobactam and meropenem. In some examples, a combination of two or more antibiotics, such as 2, 3, 4, 5, 6 or more antibiotics may be used in the provided methods. In one example, a penicillin-streptomycin solution can be used in the provided methods. In another example, a mixture of ampicillin, neomycin, metronidazole and vancomycin can be used in the methods provided herein. In yet another example, a mixture of tazobactam, meropenem and vancomycin can be used in the provided methods.

[0223] In some examples, a combination of an antibiotic and an antimycotic can be used in the methods provided herein. The antimycotic can be administered together with, before, or after administration of the antibiotic or with the virus or before or after the virus in an amount effective for treatment of any fungal infection. Antimycotics include, but are not limited to, polyene antifungals such as amphotericin B, candicidin, filipin, hamycin, natamycin, nystatin, rimocidin, imidazole antifungals, such as bifonazole, butoconazole, clotrimazole, econazole, fenticonazole, isoconazole, ketoconazole, miconazole, omoconazole, oxiconazole, sertaconazole, sulconazole and tioconazole, triazoles such as albaconazole, fluconazole, isavuconazole, itraconazole, posaconazole, ravuconazole, terconazole and voriconazole, thiazoles such as abafungin, allylamines such as amorolfine, butenafine, naftifine and terbinafine, echinocandins such as anidulafungin, caspofungin and micafungin, and other antifungals such as ciclopirox, flucytosine or 5-fluorocytosine, griseofulvin, haloprogin, polygodial, tolnaftate, undecylenic acid and crystal violet. An exemplary antimycotic is amphotericin B. For example, an antibiotic-antimycotic combination for use in the methods provided herein includes penicillin, streptomycin and amphotericin B.

[0224] Administration and Dosages

[0225] Any mode of administration of an antibiotic to a subject can be used, provided the mode of administration permits the antibiotic to effect, e.g., kill, commensal or gut bacteria. Modes of administration can include, but are not limited to, systemic, parenteral, intravenous, intraperitoneal, subcutaneous, intramuscular, transdermal, intradermal, intra-arterial (e.g., hepatic artery infusion), intravesicular perfusion, intrapleural, intraarticular, topical, intratumoral, intralesional, endoscopic, multipuncture (e.g., as used with smallpox vaccines), inhalation, percutaneous, subcutaneous, intranasal, intratracheal, oral, intracavity (e.g., administering to the bladder via a catheter, administering to the gut by suppository or enema), vaginal, rectal, intracranial, intraprostatic, intravitreal, aural, or ocular administration. In some examples, an antibiotic is administered by injection, such as intraperitoneally or intravenously. In other examples, the antibiotic is administered orally, by oral gavage, via drinking water. One skilled in the art can select any mode of administration compatible with the subject and antibiotic, and that also is likely to result in the antibiotic effecting commensal or gut bacteria.

[0226] The dosage regimen can be any of a variety of methods and amounts, and can be determined by one skilled in the art according to known clinical factors. As is known in the medical arts, dosages for any one patient can depend on many factors, including the subject's species, size, body surface area, age, sex, immunocompetence, and general health, the particular virus to be administered, duration and route of administration, the kind and stage of the disease, for example, tumor size, and other treatments or compounds, such as chemotherapeutic drugs, being administered concurrently. In addition to the above factors, such levels can be affected by the potency and nature of the antibiotic as can be determined by one skilled in the art.

[0227] In the present methods, the antibiotic can be administered in any amount that permits the antibiotic to effect, e.g., kill, commensal or gut bacteria. Dosages for antibiotics and their effects on gut bacteria are well known. Generally, the amount of antibiotic administered is an amount between at or about 1 mg and at or about 10 g, such as between at or about 1 mg and at or about 1000 mg, or at or about 1 mg and at or about 500 mg, or at or about 1 mg and at or about 250 mg, or at or about 1 mg and at or about 100 mg, or at or about 1 mg and at or about 50 mg, or at or about 1 mg and at or about 10 mg, or at or about 50 mg and at or about 5 g, or at or about 50 mg and at or about 1 g, or at or about 50 mg and at or about 500 mg, or at or about 50 mg and at or about 250 mg, or at or about 50 mg and at or about 100 mg, or at or about 100 mg and at or about 10 g, or at or about 100 mg and at or about 5 g, or at or about 100 mg and at or about 2.5, or at or about 100 mg and at or about 1, or at or about 100 mg and at or about 500 mg, or at or about 100 mg and at or about 250 mg, or at or about 500 mg and at or about 10 g, or at or about 500 mg and at or about 5 g, or at or about 500 mg and at or about 2.5, or at or about 500 mg and at or about 1 g, or at or about 1 g and at or about 10 g, or at or about 1 g and at or about 5 g, or at or about 1 g and at or about 2.5 g, or at or about 2.5 g and at or about 10 g, or at or about 2.5 g and at or about 5 g, or at or about 5 g and at or about 10 g, or is, or is about or at least 1, 2, 3, 4, 5, 6, 7, 8, 9, 10, 11, 12, 13, 14, 15, 16, 17, 18, 19, 20, 25, 30, 35, 40, 45, 50, 55, 60, 65, 70, 75, 80, 85, 90, 95, 100, 125, 150, 175, 200, 225, 250, 275, 300, 325, 350, 375, 400, 425, 450, 475, 500, 525, 550, 575, 600, 625, 650, 675, 700, 725, 750, 775, 800, 825, 850, 875, 900, 925, 950, 975 or 1000 mg, 1.1, 1.2, 1.3, 1.4, 1.5, 1.6, 1.7, 1.8, 1.9, 2, 2.5, 3, 3.5, 4, 4.5, 5, 5.5, 6, 6.5, 7, 7.5, 8, 8.5, 9, 9.5, 10 g or more. In the dosage regime, the antibiotic can be administered as a single administration or multiple times over the cycle of administration. Hence, the methods provided herein can include a single administration of an antibiotic to a subject or multiple administrations of an antibiotic to a subject. In other examples, an antibiotic can be administered on different occasions, separated in time typically by hours or days. For example, an antibiotic can be administered two times, three time, four times, five times, or six times or more with one or more hours between administration, such as 1, 2, 3, 4, 5, 6, 7, 8, 9, 10, 11, 12, 18 or 24 or more hours between administration. Separate administrations can extend the effect of killing of the bacteria.

[0228] When separate administrations are performed, each administration can be a dosage amount that is the same or different relative to other administration dosage amounts. In one example, all administration dosage amounts are the same. In other examples, a first dosage amount can be a larger dosage amount than one or more subsequent dosage amounts, for example, at least 10× larger, at least 100× larger, or at least 1000× larger than subsequent dosage amounts. In one example of a method of separate administrations in which the first dosage amount is greater than one or more subsequent dosage amounts, all subsequent dosage amounts can be the same, smaller amount relative to the first administration. Separate administrations can include any number of two or more administrations, including two, three, four, five or six administrations. One skilled in the art can readily determine the number of administrations to perform or the desirability of performing one or more additional administrations according to methods known in the art for monitoring antibiotic efficacy.

[0229] Exemplary therapeutically effective amounts of the composition depend upon the virus and antibiotic in the composition and the subject to whom the composition is administered. Typically, single dosage amounts are between or about between 1 mg and 10 g, inclusive; or between or about between 1 mg and 1 gm, inclusive, or at or about at least 500 mg and at or about or at least 5 g; or is or is at least about 1, 2, 3, 4, 5, 6, 7, 8, 9, 10, 15, 20, 25, 30, 35, 40, 45, 50, 55, 60, 65, 70, 75, 80, 85, 90, 95, 100, 125, 150, 175, 200, 225, 250, 275, 300, 325, 350, 375, 400, 425, 450, 475, 500, 525, 550, 575, 600, 625, 650, 675, 700, 725, 750, 775, 800, 825, 850, 875, 900, 925, 950, 975 or 1000 mg, 1.5, 2, 2.5, 3, 3.5, 4, 4.5, or 5 g.

### D. VIRUSES

[0230] Viruses for use in the methods provided herein include viruses for gene therapy, including but not limited to, retroviruses, adenoviruses, lentiviruses, herpes simplex viruses, vaccinia viruses, poxviruses and adeno-associated viruses (AAV). Among these viruses are oncolytic viruses, including but not limited to, Newcastle Disease viruses, parvoviruses, vaccinia viruses, reoviruses, measles viruses, vesicular stomatitis viruses (VSV), oncolytic adenoviruses and herpes viruses (HSV). Exemplary of viruses for use in the methods provided herein are oncolytic viruses, described in further detail below. The methods herein are applicable to any viral therapy, since the effect described is not dependent on the particular virus, but requires administration of an antibiotic resulting in its consequent effects on the gut bacteria and on the immune system.

[0231] 1. Exemplary Oncolytic Viruses

[0232] Oncolytic viruses are characterized by their largely tumor cell specific replication, resulting in tumor cell lysis and efficient tumor regression. Oncolytic viruses effect treatment by colonizing or accumulating in tumor cells, including metastatic tumor cells such as circulating tumor cells, and replicating. They provide an effective weapon in the tumor treatment arsenal. Oncolytic viruses include Newcastle Disease virus, parvovirus, vaccinia virus, reovirus, measles virus, vesicular stomatitis virus (VSV), oncolytic adenoviruses and herpes viruses (HSV). In many cases, tumor selectivity is an inherent property of the virus, such as vaccinia viruses and other oncolytic viruses. Generally oncolytic viruses effect treatment by replicating in tumors or tumor cells resulting in lysis.

[0233] Oncolytic viruses also include viruses that have been genetically altered to attenuate their virulence, to improve their safety profile, enhance their tumor specificity, and they have also been equipped with additional genes, for example cytotoxins, cytokines, prodrug converting enzymes to improve the overall efficacy of the viruses (see, e.g., Kirn et al., (2009) Nat Rev Cancer 9:64-71; Garcia-Aragoncillo et al., (2010) Curr Opin Mol Ther 12:403-411; see U.S. Pat. Nos. 7,588,767, 7,588,771, 7,662,398, 7,754,221, 8,021,662, 8,052,962, 8,052,962, 8,066,984, 8,221,769 and U.S. Pat. Publ. Nos. 2011/0300176, 2007/0202572, 2007/0212727, 2010/0062016, 2009/0098529, 2009/0053244, 2009/0155287, 2009/0117034, 2010/0233078, 2009/0162288, 2010/0196325, 2009/0136917, 2011/0064650, 2003/0059400, 2004/0234455, 2005/0069491, 2009/0117049, 2009/0117048, 2009/0117047, 2009/0123382, 2003/0228261, 2004/0213741, 2005/0249670, 2012/0308484 and 2012/0244068.

[0234] For example, other activities can be introduced and/or anti-tumor activity can be enhanced by including nucleic acid encoding a heterologous gene product that is a therapeutic and/or diagnostic agent or agents. In some examples, the oncolytic viruses provide oncolytic therapy of a tumor cell without the expression of a therapeutic gene. In other examples, the oncolytic viruses can express one or more genes whose products are useful for tumor therapy. For example, a virus can express proteins that cause cell death or whose products cause an anti-tumor immune response. Such genes can be considered therapeutic genes. A variety of therapeutic gene products, such as toxic or apoptotic proteins, or siRNA, are known in the art, and can be used with the oncolytic viruses provided herein. The therapeutic genes can act by directly killing the host cell, for example, as a channel-forming or other lytic protein, or by triggering apoptosis, or by inhibiting essential cellular processes, or by triggering an immune response against the cell, or by interacting with a compound that has a similar effect, for example, by converting a less active compound to a cytotoxic compound. Exemplary thereof are gene products selected from among an anticancer agent, an anti-metastatic agent, an antiangiogenic agent, an immunomodulatory molecule, an antigen, a cell matrix degradative gene, genes for tissue regeneration and reprogramming human somatic cells to pluripotency, and other genes described herein or known to one of skill in the art. In these examples, the tumor-specific replication process is capable of directly killing the infected tumor cells (oncolytic viruses) and/or strongly amplifying the copy number of the therapeutic gene carried by the viral vector.

[0235] Exemplary therapeutic genes that can be inserted into any oncolytic virus are described herein in Section D.3. and exemplified with respect to vaccinia virus (e.g. LIVP and Western Reserve). It is understood that an oncolytic virus can be modified to include nucleic acid sequences encoding any of the therapeutic genes described in Section D.3. or any known to one of skill in the art. The sequence of nucleotides encoding a gene is typically inserted into or in place of a non-essential gene or region in the genome of the virus.

[0236] Thus, oncolytic viruses for use herein include viruses that contain nucleic acid encoding another heterologous gene product that is a therapeutic and/or diagnostic agent or agents. Exemplary of such oncolytic viruses are viruses derived from the Lister strain, such as LIVP, including any containing nucleic acid encoding a heterologous gene product (e.g. GLV-1h68 and derivatives thereof). Such viruses are further described in detail in Section D.1.a.i. Among other therapeutic vaccinia viruses are the virus designated JX-594, which is a vaccinia virus that expresses GM-CSF described, for example, in U.S. Pat. No. 6,093,700, and the Wyeth strain vaccinia virus designated JX-594, which is a TK-deleted vaccinia virus that expresses GM-CSF (see, International PCT Publication No WO 2004/014314, U.S. Pat. No. 5,364,773; Mastrangelo et al. (1998) Cancer Gene Therapy 6:409-422; Kim et al. (2006) Molecular Therapeutics 14:361-370). Other oncolytic viruses include, but are not limited to, JX-954 (Parato et al. (2012) Mol. Ther., 20:749-58); ColoAd1 (Kuhn et al. (2008) PLoS One, 3:e2409; MV-CEA and MV-NIS (Msaouel et al. (2009) Curr. Opin. Mol. Ther., 11:43-53); Synco-B18R (Fu et al. (2012) Mol. Ther., 20:1871-81); OncoVEX GM-CSF (Kaufman et al. (2010) Future Oncol. 6:941-9), Reo-001 (Reolysin®, Galanis et al. (2012) Mol. Ther., 20:1998-2003); NTX-010 (Morton et al. (2010) Pediatr Blood Cancer, 55:295-303); and Coxsackieviruses A13, A15, A18, A20 and A21 (e.g. CAVATAK™, which is coxsackievirus A21.)

[0237] In addition, adenoviruses, such as the ONYX viruses and others, have been modified, such as be deletion of EA1 genes, so that they selectively replicate in cancerous cells, and, thus, are oncolytic. Adenoviruses also have been engineered to have modified tropism for tumor therapy and also as gene therapy vectors. Exemplary of such is ONYX-015, H101 and Ad5ΔCR (Hallden and Portella (2012) Expert Opin Ther Targets, 16:945-58) and TNFerade (McLoughlin et al. (2005) Ann. Surg. Oncol., 12:825-30). A conditionally replicative adenovirus Oncorine®, which is approved in China.

[0238] Any virus can be modified to remove or disrupt native genes that cause disease and insert heterologous nucleic acid molecules using standard cloning methods known in the art and described elsewhere herein. For example, the sequence of nucleotides encoding a heterologous protein is inserted into or in place of a non-essential gene or region in the genome of an unmodified oncolytic virus or is inserted into in or in place of nucleic acid encoding a heterologous gene product in the genome of an unmodified oncolytic virus. Any of the oncolytic viruses described above or in Section D.1.a further below, or otherwise known in the art, can be used as an unmodified virus herein for insertion of nucleic acid encoding a heterologous gene product.

[0239] a. Poxviruses—Vaccinia Viruses

[0240] Vaccinia viruses are oncolytic viruses that possess a variety of features that make them particularly suitable for use in wound and cancer gene therapy. For example, vaccinia is a cytoplasmic virus, thus, it does not insert its genome into the host genome during its life cycle. Unlike many other viruses that require the host's transcription machinery, vaccinia virus can support its own gene expression in the host cell cytoplasm using enzymes encoded in the viral genome. Vaccinia viruses also have a broad host and cell type range. In particular vaccinia viruses can accumulate in immunoprivileged cells or immunoprivileged tissues, including tumors and/or metastases, and also including wounded tissues and cells. Yet, unlike other oncolytic viruses, vaccinia virus can typically be cleared from the subject to whom the viruses are administered by activity of the subject's immune system, and hence are less toxic than other viruses such as adenoviruses. Thus, while the viruses can typically be cleared from the subject to whom the viruses are administered by activity of the subject's immune system, viruses can nevertheless accumulate, survive and proliferate in immunoprivileged cells and tissues such as tumors because such immunoprivileged areas are isolated from the host's immune system.

[0241] Vaccinia viruses also can be easily modified by insertion of heterologous genes. This can result in the attenuation of the virus and/or permit delivery of therapeutic proteins. For example, vaccinia virus genome has a large carrying capacity for foreign genes, where up to 25 kb of exogenous DNA fragments (approximately 12% of the vaccinia genome size) can be inserted. The genomes of several of the vaccinia strains have been completely sequenced, and many essential and nonessential genes identified. Due to high sequence homology among different strains, genomic information from one vaccinia strain can be used for designing and generating modified viruses in other strains. Finally, the techniques for production of modified vaccinia strains by genetic engineering are well established (Moss, (1993) Curr. Opin. Genet. Dev. 3:86-90; Broder and Earl, (1999) Mol. Biotechnol. 13:223-245; Timiryasova et al., (2001) Biotechniques 31:534-540).

[0242] Various vaccinia viruses have been demonstrated to exhibit antitumor activities. In one study, for example, nude mice bearing nonmetastatic colon adenocarcinoma cells were systemically injected with a WR strain of vaccinia virus modified by having a vaccinia growth factor deletion and an enhanced green fluorescence protein inserted into the thymidine kinase locus. The virus was observed to have antitumor effect, including one complete response, despite a lack of exogenous therapeutic genes in the modified virus (McCart et al. (2001) Cancer Res 1:8751-8757). In another study, vaccinia melanoma oncolysate (VMO) was injected into sites near melanoma positive lymph nodes in a Phase III clinical trial of melanoma patients. As a control, New York City Board of Health strain vaccinia virus (VV) was administered to melanoma patients. The melanoma patients treated with VMO had a survival rate better than that for untreated patients, but similar to patients treated with the VV control (Kim et al. (2001) Surgical Oncol 10:53-59).

[0243] LIVP strains of vaccinia virus also have been used for the diagnosis and therapy of tumors, and for the treatment of wounded and inflamed tissues and cells (see e.g. Zhang et al. (2007) Surgery, 142:976-983; Lin et al. (2008) J. Clin. Endocrinol., Metab., 93:4403-7; Kelly et al. (2008) Hum gene Ther., 19:774-782; Yu et al. (2009) Mol Cancer Ther., 8:141-151; Yu et al. (2009) Mol Cancer, 8:45; U.S. Pat. Nos. 7,588,767 and 8,052,968; and U.S. Patent Publication No. US20040234455). For example, when intravenously administered, LIVP strains have been demonstrated to accumulate in internal tumors at various loci in vivo, and have been demonstrated to effectively treat human tumors of various tissue origin, including, but not limited to, breast tumors, thyroid tumors, pancreatic tumors, metastatic tumors of pleural mesothelioma, squamous cell carcinoma, lung carcinoma and ovarian tumors. LIVP strains of vaccinia, including attenuated forms thereof, exhibit less toxicity than WR strains of vaccinia virus, and results in increased and longer survival of treated tumor-bearing animal models (see e.g. U.S. Patent Publication No. US20110293527).

[0244] Vaccinia is a cytoplasmic virus, thus, it does not insert its genome into the host genome during its life cycle. Vaccinia virus has a linear, double-stranded DNA genome of approximately 180,000 base pairs in length that is made up of a single continuous polynucleotide chain (Baroudy et al. (1982) Cell, 28:315-324). The structure is due to the presence of 10,000 base pair inverted terminal repeats (ITRs). The ITRs are involved in genome replication. Genome replication is believed to involve self-priming, leading to the formation of high molecular weight concatemers (isolated from infected cells) which are subsequently cleaved and repaired to make virus genomes. See, e.g., Traktman, P., Chapter 27, Poxvirus DNA Replication, pp. 775-798, in DNA Replication in Eukaryotic Cells, Cold Spring Harbor Laboratory Press (1996). The genome encodes for approximately 250 genes. In general, the nonsegmented, noninfectious genome is arranged such that centrally located genes are essential for virus replication (and are thus conserved), while genes near the two termini effect more peripheral functions such as host range and virulence. Vaccinia viruses practice differential gene expression by utilizing open reading frames (ORFs) arranged in sets that, as a general principle, do not overlap.

[0245] Vaccinia virus possesses a variety of features for use in cancer gene therapy and vaccination including broad host and cell type range, and low toxicity. For example, while most oncolytic viruses are natural pathogens, vaccinia virus has a unique history in its widespread application as a smallpox vaccine that has resulted in an established track record of safety in humans. Toxicities related to vaccinia administration occur in less than 0.1% of cases, and can be effectively addressed with immunoglobulin administration. In addition, vaccinia virus possesses a large carrying capacity for foreign genes (up to 25 kb of exogenous DNA fragments (approximately 12% of the vaccinia genome size) can be inserted into the vaccinia genome), high sequence homology among different strains for designing and generating modified viruses in other strains, and techniques for production of modified vaccinia strains by genetic engineering are well established (Moss (1993) Curr. Opin. Genet. Dev. 3: 86-90; Broder and Earl (1999) Mol. Biotechnol. 13: 223-245; Timiryasova et al. (2001) Biotechniques 31: 534-540). Vaccinia virus strains have been shown to specifically colonize solid tumors, while not infecting other organs (see, e.g., Zhang et al. (2007) Cancer Res 67:10038-10046; Yu et al., (2004) Nat Biotech 22:313-320; Heo et al., (2011) Mol Ther 19:1170-1179; Liu et al. (2008) Mol Ther 16:1637-1642; Park et al., (2008) Lancet Oncol, 9:533-542).

[0246] A variety of vaccinia virus strains are available for modification by insertion of nucleic acid encoding melanin producing enzymes, including, but not limited to, Western Reserve (WR) (SEQ ID NO:21), Copenhagen (SEQ ID NO:21), Tashkent, Tian Tan, Lister, Wyeth, IHD-J, and IHD-W, Brighton, Ankara, MVA, Dairen I, LIPV, LC16M8, LC16MO, LIVP, WR 65-16, Connaught, New York City Board of Health. Exemplary of known viruses are set forth in Table 3. Exemplary of vaccinia viruses for use in the methods provided herein include, but are not limited to, Lister strain or LIVP strain of vaccinia viruses, WR strains, or modified forms thereof. LIVP generally exhibits less virulence than the WR strain. Also, for example, a recombinant derivative of LIVP, designated GLV-1h68 (set forth in SEQ ID NO:1; GenBank Acc. No. EU410304) and GLV-1h64 (set forth in SEQ ID NO:10) exhibit tumor targeting properties and an improved safety profile compared to its parental LIVP strain (set forth in SEQ ID NO:20) and the WR strain (Zhang et al. (2009) Mol. Genet. Genomics, 282:417-435).

TABLE 3
Vaccinia Virus Strains

| Name | Abbreviation | GenBank Accession No. |
|---|---|---|
| Vaccinia virus strain Western | WR | AY243312 |
| Reserve | | |
| Vaccinia virus strain | COP | M35027 |
| Copenhagen | | |
| Vaccinia Lister major strain | LIST | AY678276 |
| Vaccinia Lister isolate LC16MO | LC | AY678277 |
| Vaccinia Lister clone VACV107 | VACV107 | DQ121394 |
| Vaccinia virus strain | ACAM | AY313847 |
| ACAM2000 | | |
| Vaccinia virus strain DUKE | DUKE | DQ439815; Li et al. |
| | | (2006) Virology J, 3: 88 |
| Vaccinia virus strain Ankara | MVA | U94848 |
| Vaccinia virus Clone3 | CLONE3 | AY138848 |

[0247] Lister and LIVP Strains

[0248] Exemplary vaccinia viruses are Lister or LIVP vaccinia viruses. Lister (also referred to as Elstree) vaccinia virus is available from any of a variety of sources. For example, the Elstree vaccinia virus is available at the ATCC under Accession Number VR-1549. The Lister vaccinia strain has high transduction efficiency in tumor cells with high levels of gene expression.

[0249] The vaccinia virus provided in the compositions and methods herein can be based on modifications to the Lister strain of vaccinia virus. LIVP is a vaccinia strain derived from Lister (ATCC Catalog No. VR-1549). As described elsewhere herein, the LIVP strain can be obtained from the Lister Institute of Viral Preparations, Moscow, Russia; the Microorganism Collection of FSR1 SRC VB Vector; or can be obtained from the Moscow Ivanovsky Institute of Virology (C0355 K0602). The LIVP strain was used for vaccination throughout the world, particularly in India and Russia, and is widely available. LIVP, including derivatives thereof, such as GLV-1h68 and derivatives of GLV-1h68, and production thereof are described, for example, in U.S. Pat. Nos. 7,588,767, 7,588,771, 7,662,398 and 7,754,221 and U.S. Patent Publication Nos. 2007/0202572, 2007/0212727, 2010/0062016, 2009/0098529, 2009/0053244, 2009/0155287, 2009/0117034, 2010/0233078, 2009/0162288, 2010/0196325, 2009/0136917, 2011/0064650; Zhang et al. (2009) Mol. Genet. Genomics, 282:417-435). A sequence of a parental genome of LIVP is set forth in SEQ ID NO:20.

[0250] LIVP strains for use in the methods provided herein also include clonal strains that are derived from LIVP and that can be present in a virus preparation propagated from LIVP. The LIVP clonal strains have a genome that differs from the parental sequence set forth in SEQ ID NO:20. The clonal strains provided herein exhibit greater anti-tumorigenicity and/or reduced toxicity compared to the recombinant or modified virus strain designated GLV-1h68 (having a genome set forth in SEQ ID NO:1).

[0251] The LIVP and clonal strains have a sequence of nucleotides that have at least 70%, such as at least 75%, 80%, 85% or 90% sequence identity to SEQ ID NO:2 or 20. For example, the clonal strains have a sequence of nucleotides that has at least 91%, 92%, 93%, 94%, 95%, 95%, 97%, 98%, 99%, 99.1%, 99.2%, 99.3%, 99.4%, 99.5%, 99.6%, 99.7%, 99.8%, 99.9% or 100% sequence identity to SEQ ID NO:2 or 20. Such LIVP clonal viruses include viruses that differ in one or more open reading frames (ORF) compared to the parental LIVP strain that has a sequence of amino acids set forth in SEQ ID NO:2 or 20. The LIVP clonal virus strains provided herein can contain a nucleotide deletion or mutation in any one or more nucleotides in any ORF compared to SEQ ID NO:2 or 20, or can contain an addition or insertion of viral DNA compared to SEQ ID NO:2 or 20.

[0252] LIVP strains in the compositions provided herein include those that have a nucleotide sequence corresponding to nucleotides 2,256-181,114 of SEQ ID NO:3, nucleotides 11,243-182,721 of SEQ ID NO:4, nucleotides 6,264-181,390 of SEQ ID NO:5, nucleotides 7,044-181,820 of SEQ ID NO:6, nucleotides 6,674-181,409 of SEQ ID NO:7, nucleotides 6,716-181,367 of SEQ ID NO:8 or nucleotides 6,899-181,870 of SEQ ID NO:9, or to a complement thereof. In some examples, the LIVP strain for use in the compositions and methods is a clonal strain of LIVP or a modified form thereof containing a sequence of nucleotides that has at least 97%, 98%, 99% or more sequence identity to a sequence of nucleotides 2,256-181,114 of SEQ ID NO:3, nucleotides 11,243-182,721 of SEQ ID NO:4, nucleotides 6,264-181,390 of SEQ ID NO:5, nucleotides 7,044-181,820 of SEQ ID NO:6, nucleotides 6,674-181,409 of SEQ ID NO:7, nucleotides 6,716-181,367 of SEQ ID NO:8 or nucleotides 6,899-181,870 of SEQ ID NO:9. LIVP clonal strains provided herein generally also include terminal nucleotides corresponding to a left and/or right inverted terminal repeat (ITR). Exemplary LIVP strains include but are not limited to virus strains designated LIVP 1.1.1 having a genome containing a sequence of nucleotides set forth in SEQ ID NO:3 or a sequence of nucleotides that exhibits at least 97% sequence identity to SEQ ID NO:3; a virus strain designated LIVP 2.1.1 having a genome containing a sequence of nucleotides set forth in SEQ ID NO:4 or a sequence of nucleotides that exhibits at least 97%, 98%, 99% or more sequence identity to SEQ ID NO:4; a virus strain designated LIVP 4.1.1 having a genome containing a sequence of nucleotides set forth in SEQ ID NO:5 or a sequence of nucleotides that exhibits at least 97%, 98%, 99% or more sequence identity to SEQ ID NO:5; a virus strain designated LIVP 5.1.1 having a genome containing a sequence of nucleotides set forth in SEQ ID NO:6 or a sequence of nucleotides that exhibits at least 97%, 98%, 99% or more sequence identity to SEQ ID NO:6; a virus strain designated LIVP 6.1.1 having a sequence of nucleotides set forth in SEQ ID NO:7 or a sequence of nucleotide that exhibits at least 97%, 98%, 99% or more sequence identity to SEQ ID NO:7; a virus strain designated LIVP 7.1.1 having a genome containing a sequence of nucleotides set forth in SEQ ID NO:8 or a sequence of nucleotides that exhibits at least 97%, 98%, 99% or more sequence identity to SEQ ID NO:8; or a virus strain designated LIVP 8.1.1 having a genome containing a sequence of nucleotides set forth in SEQ ID NO:9 or a sequence of nucleotides that exhibits at least 97%, 98%, 99% or more sequence identity to SEQ ID NO:9.

[0253] i. Modified Vaccinia Viruses

[0254] Modified or recombinant vaccinia strains containing heterologous nucleic acid encoding a gene product or products have been or can be generated from any of a variety of vaccinia virus strains, including, but not limited to, Western Reserve (WR) (SEQ ID NO:21), Copenhagen (SEQ ID NO:22), Tashkent, Tian Tan, Lister, Wyeth, IHD-J, and IHD-W, Brighton, Ankara, MVA, Dairen I, LIPV, LC16M8, LC16MO, LIVP, WR 65-16, Connaught, New York City Board of Health. Such strains, or modified strains thereof, can be used in the methods provided herein.

[0255] For example, recombinant vaccinia viruses, such as LIVP viruses, have been generated and are known in the art. Exemplary modified or recombinant vaccinia viruses for use in the methods provided herein are those derived from the Lister strain, and in particular the attenuated Lister strain LIVP. The modified LIVP viruses can be modified by insertion, deletion or amino acid replacement of heterologous nucleic acid compared to an LIVP strain having a genome set forth in any one of SEQ ID NOS:2-9 or 20, or having a genome that exhibits at least 97%, 98%, 99% or more sequence identity to any of SEQ ID NOS:2-9 or 20.

[0256] For example, known modified or recombinant LIVP viruses include GLV-1h68 or derivatives thereof. GLV-1h68 (also named RVGL21, SEQ ID NO:1; described in U.S. Pat. Pub. No. 2005-0031643, now U.S. Pat. Nos. 7,588,767, 7,588,771 and 7,662,398) is an attenuated virus of the LIVP strain containing a genome set forth in SEQ ID NO:20 that contains DNA insertions in gene loci F14.5L (also designated in LIVP as F3) gene locus, thymidine kinase (TK) gene locus, and hemagglutinin (HA) gene locus with expression cassettes encoding detectable marker proteins. Specifically, GLV-1h68 contains an expression cassette containing a Ruc-GFP cDNA molecule (a fusion of DNA encoding Renilla luciferase and DNA encoding GFP) under the control of a vaccinia synthetic early/late promoter P_{SEL} ((P_{SEL})Ruc-GFP) inserted into the F14.5L gene locus; an expression cassette containing a DNA molecule encoding beta-galactosidase under the control of the vaccinia early/late promoter P_{7.5k} ((P_{7.5k})LacZ) and DNA encoding a rat transferrin receptor positioned in the reverse orientation for transcription relative to the vaccinia synthetic early/late promoter P_{SEL} ((P_{SEL})rTrfR) inserted into the TK gene locus (the resulting virus does not express transferrin receptor protein since the DNA molecule encoding the protein is positioned in the reverse orientation for transcription relative to the promoter in the cassette); and an expression cassette containing a DNA molecule encoding β-glucuronidase under the control of the vaccinia late promoter P₁₁ₖ ((P₁₁ₖ)gusA) inserted into the HA gene locus.

[0257] Other recombinant LIVP viruses are derived from GLV-1h68 and contain heterologous DNA that encodes a gene product or products (see e.g. see e.g. U.S. Pub. Nos. US2003-0059400, US2003-0228261, US2007-0202572, US2007-0212727, US2009-0117034, US2009-0098529, US2009-0053244, US2009-0155287, US2009-0081639, US2009-0136917, US2009-0162288, US2010-0062016, US2010-0233078 and US2010-0196325; U.S. Pat. Nos. 7,588,767, 7,588,771, 7,662,398 and 7,754,221 and 7,763,420; and International Pub. No. WO 2009/139921). Exemplary of such recombinant viruses include those set forth in Table 4, including but not limited to, GLV-1h64 (set forth in SEQ ID NO:10); GLV-1h188 (SEQ ID NO:11), GLV-1h189 (SEQ ID NO:12), GLV-1h190 (SEQ ID NO:13), GLV-1h253 (SEQ ID NO:14), and GLV-1h254 (SEQ ID NO:15); GLV-1h311 (SEQ ID NO:16); GLV-1h312 (SEQ ID NO:17); GLV-1h330 (SEQ ID NO:18); or GLV-1h354 (SEQ ID NO:19).

[0258] Modified vaccinia viruses also include viruses that are modified by introduction of heterologous nucleic acid into an LIVP strain containing a genome set forth in any of SEQ ID NOS:3-9, or a genome that exhibits at least 97%, 98%, 99% or more sequence identity to any of SEQ ID NOS:3-9.

[0259] Table 4 sets forth exemplary viruses, the reference or parental vaccinia virus (e.g. LIVP set forth in SEQ ID NO:2 or 20 or GLV-1h68 set forth in SEQ ID NO:1) and the resulting genotype. The exemplary modifications of the Lister strain can be adapted to other vaccinia viruses (e.g., Western Reserve (WR), Copenhagen, Tashkent, Tian Tan, Lister, Wyeth, IHD-J, and IHD-W, Brighton, Ankara, MVA, Dairen I, LIPV, LC16M8, LC16MO, LIVP, WR 65-16, Connaught, New York City Board of Health). Any of these viruses, and other oncolytic viruses known in the art, can be used in the methods provided herein.

TABLE 4
Recombinant Viruses

| | | Genotype | | | | |
|---|---|---|---|---|---|---|
| Virus | Parent | | J2R | A56R | | |
| Name | Virus | F14.5L | (TK locus) | (HA locus) | A34R | A35R |

LIVP- & GLV-1h68-derived Virus Strains

| | | | | | | |
|---|---|---|---|---|---|---|
| GLV-1h68 | LIVP | (PSEL)Ruc- | (PSEL)rTrfR- | (P11)gusA | wt | wt |
| | | GFP | (P7.5)lacZ | | | |
| GLV-1i69 | GLV-1h68 | (PSEL)Ruc- | (PSEL)rTrfR- | (P11)gusA | A34R | wt |
| | | GFP | (P7.5)lacZ | | from | |
| | | | | | IHD-J | |
| GLV-1h70 | GLV-1h68 | (PSEL)Ruc- | (PSEL)rTrfR- | ko | wt | wt |
| | | GFP | (P7.5)lacZ | | | |
| GLV-1h71 | GLV-1h68 | ko | (PSEL)rTrfR- | (P11)gusA | wt | wt |
| | | | (P7.5)lacZ | | | |
| GLV-1h72 | GLV-1h68 | (PSEL)Ruc- | ko | (P11)gusA | wt | wt |
| | | GFP | | | | |
| GLV-1h73 | GLV-1h70 | ko | (PSEL)rTrfR- | ko | wt | wt |
| | | | (P7.5)lacZ | | | |
| GLV-1h74 | GLV-1h73 | ko | ko | ko | wt | wt |
| GLV-1h76 | GLV-1h68 | (PSEL)Ruc- | (PSE)GM-CSF | (P11)gusA | wt | wt |
| | | GFP | | | | |
| GLV-1h77 | GLV-1h68 | (PSEL)Ruc- | (PSEL)GM-CSF | (P11)gusA | wt | wt |
| | | GFP | | | | |
| GLV-1h78 | GLV-1h68 | (PSEL)Ruc- | (PSL)GM-CSF | (P11)gusA | wt | wt |
| | | GFP | | | | |
| GLV-1h79 | GLV-1h68 | (PSEL)Ruc- | (PSEL)mMCP-1 | (P11)gusA | wt | wt |
| | | GFP | | | | |
| GLV-1h80 | GLV-1h68 | (PSEL)Ruc- | (PSL)mMCP-1 | (P11)gusA | wt | wt |
| | | GFP | | | | |
| GLV-1h81 | GLV-1h68 | (PSEL)Ruc- | (PSEL)rTrfR- | (PSEL)hk5 | wt | wt |
| | | GFP | (P7.5)lacZ | | | |
| GLV-1h82 | GLV-1h22 | (PSEL)Ruc- | (PSEL)TrfR- | (PSEL)ftn | wt | wt |
| | | GFP | (P7.5)lacZ | | | |
| GLV-1h83 | GLV-1h68 | (PSEL)Ruc- | (PSEL)rTrfR- | (PSEL)ftn | wt | wt |
| | | GFP | (P7.5)lacZ | | | |
| GLV-1h84 | GLV-1h68 | ko | (PSEL)CBG99- | ko | wt | wt |
| | | | mRFP1 | | | |
| GLV-1h85 | GLV-1h72 | ko | ko | (P11)gusA | wt | wt |
| GLV-1h86 | GLV-1h72 | (PSEL)Ruc- | ko | ko | wt | wt |
| | | GFP | | | | |
| GLV-1j87 | GLV-1h68 | (PSEL)Ruc- | (PSEL)rTrfR- | (P11)gusA | wt | ko |
| | | GFP | (P7.5)lacZ | | | |
| GLV-1j88 | GLV-1h73 | ko | (PSEL)rTrfR- | ko | wt | ko |
| | | | (P7.5)lacZ | | | |
| GLV-1j89 | GLV-1h74 | ko | ko | ko | wt | ko |
| GLV-1h90 | GLV-1h68 | (PSEL)Ruc- | (PSEL)rTrfR- | (PSE)sIL- | wt | wt |
| | | GFP | (P7.5)lacZ | 6R/IL-6 | | |
| GLV-1h91 | GLV-1h68 | (PSEL)Ruc- | (PSEL)rTrfR- | (PSEL)sIL- | wt | wt |
| | | GFP | (P7.5)lacZ | 6R/IL-6 | | |
| GLV-1h92 | GLV-1h68 | (PSEL)Ruc- | (PSEL)rTrfR- | (PSL)sIL- | wt | wt |
| | | GFP | (P7.5)lacZ | 6R/IL-6 | | |
| GLV-1h93 | GLV-1h68 | (PSEL)Ruc- | (PSEL)rTrfR- | (PSE)FCU1 | wt | wt |
| | | GFP | (P7.5)lacZ | | | |
| GLV-1h94 | GLV-1h68 | (PSEL)Ruc- | (PSEL)rTrfR- | (PSEL)FCU1 | wt | wt |
| | | GFP | (P7.5)lacZ | | | |
| GLV-1h95 | GLV-1h68 | (PSEL)Ruc- | (PSEL)rTrfR- | (PSL)FCU1 | wt | wt |
| | | GFP | (P7.5)lacZ | | | |
| GLV-1h96 | GLV-1h68 | (PSE)IL-24 | (PSEL)rTrfR- | (P11)gusA | wt | wt |
| | | | (P7.5)lacZ | | | |
| GLV-1h97 | GLV-1h68 | (PSEL)IL-24 | (PSEL)rTrfR- | (P11)gusA | wt | wt |
| | | | (P7.5)lacZ | | | |
| GLV-1h98 | GLV-1h68 | (PSL)IL-24 | (PSEL)rTrfR- | (P11)gusA | wt | wt |
| | | | (P7.5)lacZ | | | |
| GLV-1h99 | GLV-1h68 | (PSE)hNET | (PSEL)rTrfR- | (P11)gusA | wt | wt |
| | | | (P7.5)lacZ | | | |
| GLV-1h100 | GLV-1h68 | (PSEL)Ruc- | (PSE)hNET | (P11)gusA | wt | wt |
| | | GFP | | | | |
| GLV-1h101 | GLV-1h68 | (PSEL)Ruc- | (PSL)hNET | (P11)gusA | wt | wt |
| | | GFP | | | | |
| GLV-1h102 | GLV-1h68 | (PSEL)Ruc- | (PSEL)rTrfR- | (PSE)hDMT | wt | wt |
| | | GFP | (P7.5)lacZ | | | |
| GLV-1h103 | GLV-1h68 | (PSEL)Ruc- | (PSL)hMCP1 | (P11)gusA | wt | wt |
| | | GFP | | | | |
| GLV-1h104 | GLV-1h68 | (PSEL)Ruc- | (PSE)tTF-RGD | (P11)gusA | wt | wt |
| | | GFP | | | | |
| GLV-1h105 | GLV-1h68 | (PSEL)Ruc- | (PSE/L)tTF- | (P11)gusA | wt | wt |
| | | GFP | RGD | | | |
| GLV-1h106 | GLV-1h68 | (PSEL)Ruc- | (PSL)tTF-RGD | (P11)gusA | wt | wt |
| | | GFP | | | | |
| GLV-1h107 | GLV-1h68 | (PSEL)Ruc- | (PSE)G6-FLAG | (P11)gusA | wt | wt |
| | | GFP | | | | |
| GLV-1h108 | GLV-1h68 | (PSEL)Ruc- | (PSEL)G6- | (P11)gusA | wt | wt |
| | | GFP | FLAG | | | |
| GLV-1h109 | GLV-1h68 | (PSEL)Ruc- | (PSL)G6-FLAG | (P11)gusA | wt | wt |
| | | GFP | | | | |
| GLV-1h110 | GLV-1h68 | (PSEL)Ruc- | (PSEL)rTrfR- | (PSE)bfr | wt | wt |
| | | GFP | (P7.5)lacZ | | | |
| GLV-1h111 | GLV-1h68 | (PSEL)Ruc- | (PSEL)rTrfR- | (PSEL)bfr | wt | wt |
| | | GFP | (P7.5)lacZ | | | |
| GLV-1h112 | GLV-1h68 | (PSEL)Ruc- | (PSEL)rTrfR- | (PSL)bfr | wt | wt |
| | | GFP | (P7.5)lacZ | | | |
| GLV-1h113 | GLV-1h68 | (PSEL)Ruc- | (PSEL)rTrfR- | (PSEL)bfrₒₚₜ | wt | wt |
| | | GFP | (P7.5)lacZ | | | |
| GLV-1h114 | GLV-1h68 | (PSEL)Ruc- | (PSEL)rTrfR- | (PSE)mtr | wt | wt |
| | | GFP | (P7.5)lacZ | | | |
| GLV-1h115 | GLV-1h68 | (PSEL)Ruc- | (PSEL)rTrfR- | (PSEL)mtr | wt | wt |
| | | GFP | (P7.5)lacZ | | | |
| GLV-1h116 | GLV-1h68 | (PSEL)Ruc- | (PSE)mMnSOD | (P11)gusA | wt | wt |
| | | GFP | | | | |
| GLV-1h117 | GLV-1h68 | (PSEL)Ruc- | (PSEL)mMnSOD | (P11)gusA | wt | wt |
| | | GFP | | | | |
| GLV-1h118 | GLV-1h68 | (PSEL)Ruc- | (PSL)mMnSOD | (P11)gusA | wt | wt |
| | | GFP | | | | |
| GLV-1h119 | GLV-1h68 | (PSEL)Ruc- | (PSE)mIP-10 | (P11)gusA | wt | wt |
| | | GFP | | | | |
| GLV-1h120 | GLV-1h68 | (PSEL)Ruc- | (PSEL)mIP-10 | (P11)gusA | wt | wt |
| | | GFP | | | | |
| GLV-1h121 | GLV-1h68 | (PSEL)Ruc- | (PSL)mIP-10 | (P11)gusA | wt | wt |
| | | GFP | | | | |
| GLV-1h122 | GLV-1h68 | (PSEL)Ruc- | (PSE)mLIGHT | (P11)gusA | wt | wt |
| | | GFP | | | | |
| GLV-1h123 | GLV-1h68 | (PSEL)Ruc- | (PSE/L)mLIGHT | (P11)gusA | wt | wt |
| | | GFP | | | | |
| GLV-1h124 | GLV-1h68 | (PSEL)Ruc- | (PSL)mLIGHT | (P11)gusA | wt | wt |
| | | GFP | | | | |
| GLV-1h125 | GLV-1h68 | (PSEL)Ruc- | (PSE)CBP | (P11)gusA | wt | wt |
| | | GFP | | | | |
| GLV-1h126 | GLV-1h68 | (PSEL)Ruc- | (PSEL)CBP | (P11)gusA | wt | wt |
| | | GFP | | | | |
| GLV-1h127 | GLV-1h68 | (PSEL)Ruc- | (PSL)CBP | (P11)gusA | wt | wt |
| | | GFP | | | | |
| GLV-1h128 | GLV-1h68 | (PSEL)Ruc- | (PSE)P60 | (P11)gusA | wt | wt |
| | | GFP | | | | |
| GLV-h129 | GLV-1h68 | (PSEL)Ruc- | (PSEL)P60 | (P11)gusA | wt | wt |
| | | GFP | | | | |
| GLV-1h130 | GLV-1h68 | (PSEL)Ruc- | (PSL)P60 | (P11)gusA | wt | wt |
| | | GFP | | | | |
| GLV-1h131 | GLV-1h68 | (PSEL)Ruc- | (PSE)hFLH | (P11)gusA | wt | wt |
| | | GFP | | | | |
| GLV-1h132 | GLV-1h68 | (PSEL)Ruc- | (PSEL)hFLH | (P11)gusA | wt | wt |
| | | GFP | | | | |
| GLV-1h133 | GLV-1h68 | (PSEL)Ruc- | (PSL)hFLH | (P11)gusA | wt | wt |
| | | GFP | | | | |
| GLV-1h134 | GLV-1h68 | (PSEL)CBG99- | (PSEL)rTrfR- | (P11)gusA | wt | wt |
| | | mRFP1 | (P7.5)lacZ | | | |
| GLV-1h135 | GLV-1h68 | wt | (PSEL)rTrfR- | (P11)gusA | wt | wt |
| | | | (P7.5)lacZ | | | |
| GLV-1h136 | GLV-1h68 | (PSEL)Ruc- | (PSE)PEDF | (P11)gusA | wt | wt |
| | | GFP | | | | |
| GLV-1h137 | GLV-1h68 | (PSEL)Ruc- | (PSEL)PEDF | (P11)gusA | wt | wt |
| | | GFP | | | | |
| GLV-1h138 | GLV-1h68 | (PSEL)Ruc- | (PSL)PEDF | (P11)gusA | wt | wt |
| | | GFP | | | | |
| GLV-1h139 | GLV-1h68 | (PSEL)Ruc- | (PSEL)rTrfR- | (PSE)hNET | wt | wt |
| | | GFP | (P7.5)lacZ | | | |
| GLV-1h140 | GLV-1h68 | (PSEL)Ruc- | (PSE)CYP11B1 | (P11)gusA | wt | wt |
| | | GFP | | | | |
| GLV-1h141 | GLV-1h68 | (PSEL)Ruc- | (PSEL)CYP11B1 | (P11)gusA | wt | wt |
| | | GFP | | | | |
| GLV-1h142 | GLV-1h68 | (PSEL)Ruc- | (PSL)CYP11B1 | (P11)gusA | wt | wt |
| | | GFP | | | | |
| GLV-1h143 | GLV-1h68 | (PSEL)Ruc- | (PSE)CYP11B2 | (P11)gusA | wt | wt |
| | | GFP | | | | |
| GLV-1h144 | GLV-1h68 | (PSEL)Ruc- | (PSEL)CYP11B2 | (P11)gusA | wt | wt |
| | | GFP | | | | |
| GLV-1h145 | GLV-1h68 | (PSEL)Ruc- | (PSL)CYP11B2 | (P11)gusA | wt | wt |
| | | GFP | | | | |
| GLV-1h146 | GLV-1h100 | (PSEL)Ruc- | (PSE)hNET | (PSE)IL-24 | wt | wt |
| | | GFP | | | | |
| GLV-1h147 | GLV-1h68 | (PSEL)Ruc- | (PSE)HACE1 | (P11)gusA | wt | wt |
| | | GFP | | | | |
| GLV-1h148 | GLV-1h68 | (PSEL)Ruc- | (PSEL)HACE1 | (P11)gusA | wt | wt |
| | | GFP | | | | |
| GLV-1h149 | GLV-1h68 | (PSEL)Ruc- | (PSL)HACE1 | (P11)gusA | wt | wt |
| | | GFP | | | | |
| GLV-1h150 | GLV-1h101 | (PSEL)Ruc- | (PSL)hNET | (PSE)IL-24 | wt | wt |
| | | GFP | | | | |
| GLV-1h151 | GLV-1h68 | (PSEL) Ruc- | (PSE/L)TfR- | (PSE)hNIS | wt | wt |
| | | GFP | (P7.5)lacZ | | | |
| GLV-1h153 | GLV-1h68 | (PSEL) Ruc- | (PSEL)TfR- | (PSE)hNISa | wt | wt |
| | | GFP | (P7.5)lacZ | | | |
| GLV-1h154 | GLV-1h22 | (PSEL) Ruc- | (PSEL)TfR- | (PSEL)bfrₒₚₜ | wt | wt |
| | | GFP | (P7.5)lacZ | | | |
| GLV-1h155 | GLV-1h22 | (PSEL) Ruc- | (PSEL)TfR- | (PSEL)hFH | wt | wt |
| | | GFP | (P7.5)lacZ | | | |
| GLV-1h156 | GLV-1h113 | (PSEL) Ruc- | (PSEL)mtr | (PSEL)bfrₒₚₜ | wt | wt |
| | | GFP | | | | |
| GLV-1h157 | GLV-1h68 | (PSEL) Ruc- | (PSEL)mtr | (PSEL)hFH | wt | wt |
| | | GFP | | | | |
| GLV-1h158 | GLV-1h68 | (PSEL) Ruc- | (PSEL)TfR- | (PSEL)G6-scAb | wt | wt |
| | | GFP | (P7.5)lacZ | | | |
| GLV-1h159 | GLV-1h68 | (PSEL) Ruc- | (PSEL)TfR- | (PSL)G6-scAb | wt | wt |
| | | GFP | (P7.5)lacZ | | | |
| GLV-1h160 | GLV-1h68 | (PSEL)Ruc- | (PSEL)luxAB | (P11)gusA | wt | wt |
| | | GFP | | | | |
| GLV-1h161 | GLV-1h68 | (PSEL)Ruc- | (PSEL)TfR- | (PSEL)luxCD | wt | wt |
| | | GFP | (P7.5)lacZ | | | |
| GLV-1h162 | GLV-1h68 | (PSEL)luxE | (PSEL)rTrfR- | (P11)gusA | wt | wt |
| | | | (P7.5)lacZ | | | |
| GLV-1h163 | GLV-1h100 | (PSEL)Ruc- | (PSE)hNET | (PSEL)G6-scAb | wt | wt |
| | | GFP | | | | |
| GLV-1h164 | GLV-1h100 | (PSEL)Ruc- | (PSE)hNET | (PSL)G6-scAb | wt | wt |
| | | GFP | | | | |
| GLV-1h165 | GLV-1h68 | (PSEL)Ruc- | (PSE)nAG | (P11)gusA | wt | wt |
| | | GFP | | | | |
| GLV-1h166 | GLV-1h68 | (PSEL)Ruc- | (PSEL)NAG | (P11)gusA | wt | wt |
| | | GFP | | | | |
| GLV-1h167 | GLV-1h68 | (PSEL)Ruc- | (PSL)nAG | (P11)gusA | wt | wt |
| | | GFP | | | | |
| GLV-1h168 | GLV-1h68 | (PSEL)Ruc- | (PSE)RLN | (P11)gusA | wt | wt |
| | | GFP | | | | |
| GLV-1h169 | GLV-1h68 | (PSEL)Ruc- | (PSEL)RLN | (P11)gusA | wt | wt |
| | | GFP | | | | |
| GLV-1h170 | GLV-1h68 | (PSEL)Ruc- | (PSL)RLN | (P11)gusA | wt | wt |
| | | GFP | | | | |
| GLV-1h171 | GLV-1h68 | (PSEL)Ruc- | (PSE)NM23A | (P11)gusA | wt | wt |
| | | GFP | | | | |
| GLV-1h172 | GLV-1h68 | (PSEL)Ruc- | (PSEL)NM23A | (P11)gusA | wt | wt |
| | | GFP | | | | |
| GLV-1h173 | GLV-1h68 | (PSEL)Ruc- | (PSL)NM23 | (P11)gusA | wt | wt |
| | | GFP | | | | |
| GLV-1h174 | GLV-1h68 | (PSEL)Ruc- | (PSE)NPPA1 | (P11)gusA | wt | wt |
| | | GFP | | | | |
| GLV-1h175 | GLV-1h68 | (PSEL)Ruc- | (PSEL)NPPA1 | (P11)gusA | wt | wt |
| | | GFP | | | | |
| GLV-1h176 | GLV-1h68 | (PSEL)Ruc- | (PSL)NPPA1 | (P11)gusA | wt | wt |
| | | GFP | | | | |
| GLV-1h177 | GLV-1h68 | (PSEL)Ruc- | (PSE)STAT1α | (P11)gusA | wt | wt |
| | | GFP | | | | |
| GLV-1h178 | GLV-1h68 | (PSEL)Ruc- | (PSEL)STAT1α | (P11)gusA | wt | wt |
| | | GFP | | | | |
| GLV-1h179 | GLV-1h68 | (PSEL)Ruc- | (PSL)STAT1α | (P11)gusA | wt | wt |
| | | GFP | | | | |
| GLV-1h180 | GLV-1h68 | (PSEL)Ruc- | (PSE)CPG2 | (P11)gusA | wt | wt |
| | | GFP | | | | |
| GLV-1h181 | GLV-1h68 | (PSEL)Ruc- | (PSEL)CPG2 | (P11)gusA | wt | wt |
| | | GFP | | | | |
| GLV-1h182 | GLV-1h68 | (PSEL)Ruc- | (PSL)CPG2 | (P11)gusA | wt | wt |
| | | GFP | | | | |
| GLV-1h183 | GLV-1h68 | (PSEL)Ruc- | (PSE)Ecad | (P11)gusA | wt | wt |
| | | GFP | | | | |
| GLV-1h184 | GLV-1h68 | (PSEL) Ruc- | (PSE/L)TfR- | (PSE)magA | wt | wt |
| | | GFP | (P7.5)lacZ | | | |
| GLV-1h185 | GLV-1h68 | (PSEL)Ruc- | (PSL)Ecad | (P11)gusA | wt | wt |
| | | GFP | | | | |
| GLV-1h186 | GLV-1h68 | (PSEL) Ruc- | (PSEL)TfR- | (PSEL)FTL | wt | wt |
| | | GFP | (P7.5)lacZ | 498-499InsTC | | |
| GLV-1h187 | GLV-1h68 | (PSEL) Ruc- | (PSEL)TfR- | (PSEL)FTL | wt | wt |
| | | GFP | (P7.5)lacZ | | | |
| GLV-1h188 | GLV-1h68 | (PSEL) Ruc- | (PSEL)TfR- | (PSE)FUKW | wt | wt |
| | | GFP | (P7.5)lacZ | | | |
| GLV-1h189 | GLV-1h68 | (PSEL) Ruc- | (PSEL)TfR- | (PSEL)FUKW | wt | wt |
| | | GFP | (P7.5)lacZ | | | |
| GLV-1h190 | GLV-1h68 | (PSEL) Ruc- | (PSEL)TfR- | (PSL)FUKW | wt | wt |
| | | GFP | (P7.5)lacZ | | | |
| GLV-1h191 | GLV-1h68 | (PSEL)Ruc- | (PSE)STAT1β | (P11)gusA | wt | wt |
| | | GFP | | | | |
| GLV-1h192 | GLV-1h68 | (PSEL)Ruc- | (PSEL)STAT1β | (P11)gusA | wt | wt |
| | | GFP | | | | |
| GLV-1h193 | GLV-1h68 | (PSEL)Ruc- | (PSL)STAT1β | (P11)gusA | wt | wt |
| | | GFP | | | | |
| GLV-1h194 | GLV-1h161 | (PSE)luxE | (PSEL)TfR- | (PSEL)luxCD | wt | wt |
| | | | (P7.5)lacZ | | | |
| GLV-1h195 | GLV-1h161 | (PSEL)Ruc- | (PSE)luxAB | (PSEL)luxCD | wt | wt |
| | | GFP | | | | |
| GLV-1h196 | GLV-1h68 | (PSEL)Ruc- | (PSE)181a | (P11)gusA | wt | wt |
| | | GFP | | | | |
| GLV-1h197 | GLV-1h68 | | | | | |
| GLV-1h198 | GLV-1h68 | (PSEL)Ruc- | (PSL)181a | (P11)gusA | wt | wt |
| | | GFP | | | | |
| GLV-1h199 | GLV-1h68 | (PSEL)Ruc- | (PSE)335 | (P11)gusA | wt | wt |
| | | GFP | | | | |
| GLV-1h201 | GLV-1h68 | (PSEL)Ruc- | (PSL)335 | (P11)gusA | wt | wt |
| | | GFP | | | | |
| GLV-1h202 | GLV-1h68 | | | | | |
| GLV-1h203 | GLV-1h68 | (PSEL)Ruc- | (PSEL)126 | (P11)gusA | wt | wt |
| | | GFP | | | | |
| GLV-1h204 | GLV-1h68 | | | | | |
| GLV-1h205 | GLV-1h68 | (PSEL) Ruc- | (PSEL)TfR- | (PSE)NANOG | wt | wt |
| | | GFP | (P7.5)lacZ | | | |
| GLV-1h208 | GLV-1h68 | (PSEL) Ruc- | (PSEL)TfR- | (PSE)Oct4 | wt | wt |
| | | GFP | (P7.5)lacZ | | | |
| GLV-1h210 | GLV-1h68 | (PSEL)Ruc- | (P7.5E)hEPO | (P11)gusA | wt | wt |
| | | GFP | | | | |
| GLV-1h211 | GLV-1h68 | (PSEL)Ruc- | (PSE)hEPO | (P11)gusA | wt | wt |
| | | GFP | | | | |
| GLV-1h212 | GLV-1h68 | (PSEL)Ruc- | (PSEL)hEPO | (P11)gusA | wt | wt |
| | | GFP | | | | |
| GLV-1h213 | GLV-1h68 | (PSEL)Ruc- | (PSL)hEPO | (P11)gusA | wt | wt |
| | | GFP | | | | |
| GLV-1h214 | GLV-1h68 | (PSEL)Ruc- | (PSE)OspF | (P11)gusA | wt | wt |
| | | GFP | | | | |
| GLV-1h215 | GLV-1h68 | (PSEL)Ruc- | (PSE)OspG | (P11)gusA | wt | wt |
| | | GFP | | | | |
| GLV-1h216 | GLV-1h68 | (PSEL)Ruc- | (PSEL)OspG | (P11)gusA | wt | wt |
| | | GFP | | | | |
| GLV-1h217 | GLV-1h68 | (PSEL)Ruc- | (PSL)OspG | (P11)gusA | wt | wt |
| | | GFP | | | | |
| GLV-1h218 | GLV-1h84 | ko | (PSEL)CBG99- | (PSE)RLN | wt | wt |
| | | | mRFP1 | | | |
| GLV-1h219 | GLV-1h84 | ko | (PSEL)CBG99- | (PSEL)RLN | wt | wt |
| | | | mRFP1 | | | |
| GLV-1h220 | GLV-1h84 | ko | (PSEL)CBG99- | (PSL)RLN | wt | wt |
| | | | mRFP1 | | | |
| GLV-1h221 | GLV-1h160 | (PSE)luxE | (PSEL)luxAB | (P11)gusA | wt | wt |
| GLV-1h222 | GLV-1h68 | (PSEL)Ruc- | (PSE)Ngn3 | (P11)gusA | wt | wt |
| | | GFP | | | | |
| GLV-1h223 | GLV-1h68 | (PSEL)Ruc- | (PSEL)Ngn3 | (P11)gusA | wt | wt |
| | | GFP | | | | |
| GLV-1h224 | GLV-1h68 | (PSEL)Ruc- | (PSL)Ngn3 | (P11)gusA | wt | wt |
| | | GFP | | | | |
| GLV-1h225 | GLV-1h68 | (PSEL)Ruc- | (PSE)hADH | (P11)gusA | wt | wt |
| | | GFP | | | | |
| GLV-1h226 | GLV-1h68 | (PSEL)Ruc- | (PSEL)hADH | (P11)gusA | wt | wt |
| | | GFP | | | | |
| GLV-1h227 | GLV-1h68 | (PSEL)Ruc- | (PSL)hADH | (P11)gusA | wt | wt |
| | | GFP | | | | |
| GLV-1h228 | GLV-1h194 | (PSE)luxE | (PSE)luxAB | (PSEL)luxCD | wt | wt |
| GLV-1h229 | GLV-1h195 | (PSEL)luxE | (PSE)luxAB | (PSEL)luxCD | wt | wt |
| GLV-1h230 | GLV-1h68 | (PSEL)Ruc- | (PSE)Myc-CTR1 | (P11)gusA | wt | wt |
| | | GFP | | | | |
| GLV-1h231 | GLV-1h68 | (PSEL)Ruc- | (PSL)Myc-CTR1 | (P11)gusA | wt | wt |
| | | GFP | | | | |
| GLV-1h232 | GLV-1h68 | (PSEL)Ruc- | (PSE)CTR1 | (P11)gusA | wt | wt |
| | | GFP | | | | |
| GLV-1h233 | GLV-1h68 | (PSEL)Ruc- | (PSE)mPEDF | (P11)gusA | wt | wt |
| | | GFP | | | | |
| GLV-1h234 | GLV-1h68 | (PSEL)Ruc- | (PSEL)mPEDF | (P11)gusA | wt | wt |
| | | GFP | | | | |
| GLV-1h235 | GLV-1h68 | (PSEL)Ruc- | (PSL)mPEDF | (P11)gusA | wt | wt |
| | | GFP | | | | |
| GLV-1h236 | GLV-1h73 | (PSEL)Ruc- | rtfr(PEL) | (PSE)WTCDC6 | wt | wt |
| | | GFP | (P7.5)lacZ | | | |
| GLV-1h237 | GLV-1h73 | (PSEL)Ruc- | rtfr(PEL) | (PSE)MutCDC6 | wt | wt |
| | | GFP | (P7.5)lacZ | | | |
| GLV-1h238 | GLV-1h68 | (PSEL) Ruc- | (PSEL)TfR- | (PSL)CBG99- | wt | wt |
| | | GFP | (P7.5)lacZ | mRFP1 | | |
| GLV-1h239 | GLV-1h68 | (PSEL)Ruc- | (PSE)GLAF-3 | (P11)gusA | wt | wt |
| | | GFP | | | | |
| GLV-1h240 | GLV-1h68 | (PSEL)Ruc- | (PSEL)GLAF-3 | (P11)gusA | wt | wt |
| | | GFP | | | | |
| GLV-1h241 | GLV-1h68 | (PSEL)Ruc- | (PSL)GLAF-3 | (P11)gusA | wt | wt |
| | | GFP | | | | |
| GLV-1h242 | GLV-1h68 | (PSEL)Ruc- | (PE)luxABCDE | (P11)gusA | wt | wt |
| | | GFP | | | | |
| GLV-1h243 | GLV-1h242 | (PSEL)Ruc- | (PE)luxABCDE | (PSE)frp | wt | wt |
| | | GFP | | | | |
| GLV-1h244 | GLV-1h189 | (PSEL) Ruc- | (PSE)hNISa | (PSEL)FUKW | wt | wt |
| | | GFP | | | | |
| GLV-1h245 | GLV-1h189 | (PSEL) Ruc- | (PSEL)hNISa | (PSEL)FUKW | wt | wt |
| | | GFP | | | | |
| GLV-1h246 | GLV-1h189 | (PSEL) Ruc- | (PSL)hNISa | (PSEL)FUKW | wt | wt |
| | | GFP | | | | |
| GLV-1h247 | GLV-1h68 | (PSEL) Ruc- | (PSEL)TfR- | (PSE)IFP | wt | wt |
| | | GFP | (P7.5)lacZ | | | |
| GLV-1h248 | GLV-1h68 | (PSEL) Ruc- | (PSEL)TfR- | (PSEL)IFP | wt | wt |
| | | GFP | (P7.5)lacZ | | | |
| GLV-1h249 | GLV-1h68 | (PSEL) Ruc- | (PSEL)TfR- | (PSL)IFP | wt | wt |
| | | GFP | (P7.5)lacZ | | | |
| GLV-1h250 | GLV-1h190 | (PSEL) Ruc- | (PSEL)TfR- | (PSL)FUKW | wt | wt |
| | | GFP | (P7.5)lacZ | | | |
| GLV-1h251 | GLV-1h68 | (PSE)hNISa | (PSEL)rTrfR- | (P11)gusA | wt | wt |
| | | | (P7.5)lacZ | | | |
| GLV-1h252 | GLV-1h68 | (PSEL)Ruc- | (PSE)hNISa | (P11)gusA | wt | wt |
| | | GFP | | | | |
| GLV-1h253 | GLV-1h71 | ko | (PSEL)TfR- | (PSE)FUKW | wt | wt |
| | | | (P7.5)lacZ | | | |
| GLV-1h254 | GLV-1h71 | ko | (PSEL)TfR- | (PSL)FUKW | wt | wt |
| | | | (P7.5)lacZ | | | |
| GLV-1h255 | GLV-1h68 | (PSEL)Ruc- | (PSE)hMMP9 | (P11)gusA | wt | wt |
| | | GFP | | | | |
| GLV-1h256 | GLV-1h68 | (PSEL)Ruc- | (PSL)hMMP9 | (P11)gusA | wt | wt |
| | | GFP | | | | |
| GLV-1h257 | GLV-1h68 | (PSEL) Ruc- | (PSEL)TfR- | (PSE)mNep- | wt | wt |
| | | GFP | (P7.5)lacZ | tune | | |
| GLV-1h258 | GLV-1h68 | (PSEL) Ruc- | (PSEL)TfR- | (PSEL)mNep- | wt | wt |
| | | GFP | (P7.5)lacZ | tune | | |
| GLV-1h259 | GLV-1h68 | (PSEL) Ruc- | (PSEL)TfR- | (PSL)mNep- | wt | wt |
| | | GFP | (P7.5)lacZ | tune | | |
| GLV-1h260 | GLV-1h68 | (PSE)mNep- | (PSEL)rTrfR- | (P11)gusA | wt | wt |
| | | tune | (P7.5)lacZ | | | |
| GLV-1h261 | GLV-1h68 | (PSEL)mNep- | (PSEL)rTrfR- | (P11)gusA | wt | wt |
| | | tune | (P7.5)lacZ | | | |
| GLV-1h262 | GLV-1h68 | (PSL)mNep- | (PSEL)rTrfR- | (P11)gusA | wt | wt |
| | | tune | (P7.5)lacZ | | | |
| GLV-1h263 | GLV-1h164 | (PSE)mNep- | (PSE)hNET | (PSL)G6-scAb | wt | wt |
| | | tune | | | | |
| GLV-1h264 | GLV-1h164 | (PSEL)mNep- | (PSE)hNET | (PSL)G6-scAb | wt | wt |
| | | tune | | | | |
| GLV-1h265 | GLV-1h164 | (PSL)mNep- | (PSE)hNET | (PSL)G6-scAb | wt | wt |
| | | tune | | | | |
| GLV-1h266 | GLV-1h189 | (PSEL) Ruc- | (PSE)AlstR | (PSEL)FUKW | wt | wt |
| | | GFP | | | | |
| GLV-1h267 | GLV-1h189 | (PSEL) Ruc- | (PSEL)AlstR | (PSEL)FUKW | wt | wt |
| | | GFP | | | | |
| GLV-1h268 | GLV-1h189 | (PSEL) Ruc- | (PSL)AlstR | (PSEL)FUKW | wt | wt |
| | | GFP | | | | |
| GLV-1h269 | GLV-1h189 | (PSEL) Ruc- | (PSE)PEPR1 | (PSEL)FUKW | wt | wt |
| | | GFP | | | | |
| GLV-1h270 | GLV-1h189 | (PSEL) Ruc- | (PSEL)PEPR1 | (PSEL)FUKW | wt | wt |
| | | GFP | | | | |
| GLV-1h271 | GLV-1h189 | (PSEL) Ruc- | (PSL)PEPR1 | (PSEL)FUKW | wt | wt |
| | | GFP | | | | |
| GLV-1h272 | GLV-1h189 | (PSEL) Ruc- | (PSE)LAT4 | (PSEL)FUKW | wt | wt |
| | | GFP | | | | |
| GLV-1h273 | GLV-1h189 | (PSEL) Ruc- | (PSEL)LAT4 | (PSEL)FUKW | wt | wt |
| | | GFP | | | | |
| GLV-1h274 | GLV-1h189 | (PSEL) Ruc- | (PSL)LAT4 | (PSEL)FUKW | wt | wt |
| | | GFP | | | | |
| GLV-1h275 | GLV-1h189 | (PSEL) Ruc- | (PSE)Cyp51 | (PSEL)FUKW | wt | wt |
| | | GFP | | | | |
| GLV-1h276 | GLV-1h189 | (PSEL) Ruc- | (PSEL)Cyp51 | (PSEL)FUKW | wt | wt |
| | | GFP | | | | |
| GLV-1h277 | GLV-1h189 | (PSEL) Ruc- | (PSL)Cyp51 | (PSEL)FUKW | wt | wt |
| | | GFP | | | | |
| GLV-1h284 | GLV-1h189 | (PSEL)Ruc- | (PSE)BMP4 | (PSEL)FUKW | wt | wt |
| | | GFP | | | | |
| GLV-1h285 | GLV-1h189 | (PSEL)Ruc- | (PSEL)BMP4 | (PSEL)FUKW | wt | wt |
| | | GFP | | | | |
| GLV-1h286 | GLV-1h189 | (PSEL)Ruc- | (PSL)BMP4 | (PSEL)FUKW | wt | wt |
| | | GFP | | | | |
| GLV-1h311 | GLV-1h68 | (P_{SEL})Ruc-GFP | (P_{SL})tetO-CBG99- | (P₁₁ₖ)gusA | wt | wt |
| | | | mRFP | | | |
| GLV-1h312 | GLV-1h311 | (P_{7.5k}) -TetR | (P_{SL})tetO-CBG99- | (P₁₁ₖ)gusA | wt | wt |
| | | | mRFP | | | |
| GLV-1h330 | GLV-1h68 | (P_{7.5})tetR | (P_{SEL})rTrfR- | (P₁₁ₖ)gusA | wt | wt |
| | | | (P_{7.5k})LacZ | | | |
| GLV-1h354 | GLV-1h311 | (P_{SEL})tetR | (P_{SL})tetO-CBG99 | (P₁₁ₖ)gusA | wt | wt |
| | | | mRFP1 | | | |

[0260] b. Other Oncolytic Viruses

[0261] Oncolytic viruses for use in the methods provided here are well known to one of skill in the art and include, for example, vesicular stomatitis virus, see, e.g., U.S. Pat. Nos. 7,731,974, 7,153,510, 6,653,103 and U.S. Pat. Pub. Nos. 2010/0178684, 2010/0172877, 2010/0113567, 2007/0098743, 20050260601, 20050220818 and EP Pat. Nos. 1385466, 1606411 and 1520175; herpes simplex virus, see, e.g., U.S. Pat. Nos. 7,897,146, 7731,952, 7,550,296, 7,537,924, 6,723,316, 6,428,968 and U.S. Pat. Pub. Nos. 2011/0177032, 2011/0158948, 2010/0092515, 2009/0274728, 2009/0285860, 2009/0215147, 2009/0010889, 2007/0110720, 2006/0039894 and 20040009604; retroviruses, see, e.g., U.S. Pat. Nos. 6,689,871, 6,635,472, 5,851,529, 5,716,826, 5,716,613 and U.S. Pat. Pub. No. 20110212530; and adeno-associated viruses, see, e.g., U.S. Pat. Nos. 8,007,780, 7,968,340, 7,943,374, 7,906,111, 7,927,585, 7,811,814, 7,662,627, 7,241,447, 7,238,526, 7,172,893, 7,033,826, 7,001,765, 6,897,045, and 6,632,670.

[0262] 3. Modification of Viruses

[0263] The large genome size of poxviruses, such as the vaccinia viruses in the compositions provided herein, allows large inserts of heterologous DNA and/or multiple inserts of heterologous DNA to be incorporated into the genome (Smith and Moss (1983) Gene 25(1):21-28). Unmodified vaccinia viruses for use in the methods provided herein also can contain genes encoding other heterologous gene products. Thus, the vaccinia viruses in the compositions and methods provided herein can be modified by insertion of 1, 2, 3, 4, 5, 6, 7, 8, 9, 10 or more heterologous DNA molecules. Generally, the one or more heterologous DNA molecules are inserted into a non-essential region of the virus genome. For example, the one or more heterologous DNA molecules are inserted into a locus of the virus genome that is non-essential for replication in proliferating cells, such as tumor cells. Exemplary insertion sites are provided herein below and are known in the art. In some examples, the virus can be modified to express an exogenous or heterologous gene. Exemplary exogenous gene products include proteins and RNA molecules. The modified viruses can express a therapeutic gene product, a detectable gene product, a gene product for manufacturing or harvesting, an antigenic gene product for antibody harvesting, or a viral gene product. The characteristics of such gene products are described herein and elsewhere.

[0264] In some examples, the viruses can be modified to express two or more gene products, such as 2, 3, 4, 5, 6, 7, 8, 9, 10 or more gene products, where any combination of the two or more gene products can be one or more detectable gene products, therapeutic gene products, gene products for manufacturing or harvesting or antigenic gene products for antibody harvesting or a viral gene product. In one example, a virus can be modified to express an anticancer gene product. In another example, a virus can be modified to express two or more gene products for detection or two or more therapeutic gene products. In some examples, one or more proteins involved in biosynthesis of a luciferase substrate can be expressed along with luciferase. When two or more exogenous genes are introduced, the genes can be regulated under the same or different regulatory sequences, and the genes can be inserted in the same or different regions of the viral genome, in a single or a plurality of genetic manipulation steps. In some examples, one gene, such as a gene encoding a detectable gene product, can be under the control of a constitutive promoter, while a second gene, such as a gene encoding a therapeutic gene product, can be under the control of an inducible promoter. Methods for inserting two or more genes in to a virus are known in the art and can be readily performed for a wide variety of viruses using a wide variety of exogenous genes, regulatory sequences, and/or other nucleic acid sequences.

[0265] The heterologous DNA can be an exemplary gene, including any from the list of human genes and genetic disorders authored and edited by Dr. Victor A. McKusick and his colleagues at Johns Hopkins University and elsewhere, and developed for the World Wide Web by NCBI, the National Center for Biotechnology Information; online, Mendelian Inheritance in Man, OMIM™ Center for Medical Genetics, Johns Hopkins University (Baltimore, Md.), and National Center for Biotechnology Information, National Library of Medicine (Bethesda, Md.), 1999; and those available in public databases, such as PubMed and GenBank (see, e.g., (ncbi.nlm.nih.gov/entrez/query.fcgi?db=OMIM).

[0266] In particular, viruses provided herein can be modified to express an anti-tumor antibody, an anti-metastatic gene or metastasis suppressor genes; cell matrix degradative genes; hormones; growth factors; immune modulatory molecules, including a cytokine, such as interleukins or interferons, a chemokine, including CXC chemokines, costimulatory molecules; ribozymes; transporter protein; antibody or fragment thereof; antisense RNA; siRNA; microRNAs; protein ligands; a mitosis inhibitor protein; an antimitotic oligopeptide; an anti-cancer polypeptide; anti-cancer antibiotics; angiogenesis inhibitors; anti-angiogenic factors; tissue factors; a prodrug converting enzyme; genes for tissue regeneration and reprogramming human somatic cells to pluripotency; enzymes that modify a substrate to produce a detectable product or signal or are detectable by antibodies; a viral attenuation factors; a superantigen; proteins that can bind a contrasting agent, chromophore, or a compound of ligand that can be detected; tumor suppressors; cytotoxic protein; cytostatic protein; genes for optical imaging or detection including luciferase, a fluorescent protein such as a green fluorescent protein (GFP) or GFP-like protein, a red fluorescent protein (RFP), a far-red fluorescent protein, a near-infrared fluorescent protein, a yellow fluorescent protein (YFP), an orange fluorescent protein (OFP), a cerulean fluorescent protein (CFP), or a blue fluorescent protein (BFP), and phycobiliproteins from certain cyanobacteria and eukaryotic algae, including phycoerythrins (red) and the phycocyanins (blue); genes for PET imaging; genes for MRI imaging; or genes to alter attenuation of the viruses.

[0267] a. Heterologous Nucleic Acid and Exemplary Modifications

[0268] Exemplary heterologous genes for modification of viruses herein are known in the art (see e.g. U.S. Pub. Nos. US2003-0059400, US2003-0228261, US2009-0117034, US2009-0098529, US2009-0053244, US2009-0081639 and US2009-0136917; U.S. Pat. Nos. 7,588,767 and 7,763,420; and International Pub. No. WO 2009/139921). A non-limiting description of exemplary genes encoding heterologous proteins for modification of virus strains is set forth in the following table. The sequence of the gene and encoded proteins are known to one of skill in the art from the literature. Hence, provided herein are virus strains, including any of the clonal viruses provided herein, that contain nucleotides encoding any of the heterologous proteins listed in Table 5.

TABLE 5
Exemplary Genes and Gene Products

```
Detectable gene products
  Optical Imaging
  Luciferase
```

bacterial luciferase
luciferase (from Vibrio harveyi or Vibrio fischeri)

luxA
luxB
luxC
luxD
luxE
luxAB
luxCD
luxABCDE

firefly luciferase
Renilla luciferase from Renilla reniformis
Gaussia luciferase
luciferases found among marine arthropods
luciferases that catalyze the oxidation of Cypridina (Vargula) luciferin
luciferases that catalyze the oxidation of Coleoptera luciferin

luciferase photoproteins

aequorin photoprotein to which luciferin is non-covalently bound

click beetle luciferase

CBG99
(CBG99)mRFP1

Fusion Proteins

Ruc-GFP

Fluorescent Proteins
GFP

aequorin from Aequorea victoria
GFP from Aequorea victoria
GFP from Aequorea coerulescens
GFP from the anthozoan coelenterates Renilla reniformis and Renilla koellikeri (sea
pansies)
Emerald (Invitrogen, Carlsbad, CA)
EGFP (Clontech, Palo Alto, CA)
Azami-Green (MBL International, Woburn, MA)
Kaede (MBL International, Woburn, MA)
ZsGreen1 (Clontech, Palo Alto, CA)
CopGFP (Evrogen/Axxora, LLC, San Diego, CA)
Anthozoa reef coral
Anemonia sea anemone
Renilla sea pansy
Galaxea coral
Acropora brown coral
Trachyphyllia stony coral
Pectiniidae stony coral
GFP-like proteins

RFP

RFP from the corallimorph Discosoma (DsRed) (Matz et al. (1999) Nature Biotechnology
17: 969-973)
Heteractis reef coral, Actinia or Entacmaea sea anemone
RFPs from Discosoma variants

mRFP1 (Wang et al. (2004) Proc. Natl. Acad. Sci. U.S.A.101: 16745-9)
mCherry (Wang et al. (2004) PNAS USA.101(48): 16745-9)
tdTomato (Wang et al. (2004) PNAS USA.101(48): 16745-9)
mStrawberry (Wang et al. (2004) PNAS USA.101(48): 16745-9)
mTangerine (Wang et al. (2004) PNAS USA.101(48): 16745-9)
DsRed2 (Clontech, Palo Alto, CA)
DsRed-T1 (Bevis and Glick (2002) Nat. Biotechnol. 20: 83-87)
Anthomedusae J-Red (Evrogen)
Anemonia AsRed2 (Clontech, Palo Alto, CA)

far-red fluorescent protein

TurboFP635
mNeptune monomeric far-red fluorescent protein
Actinia AQ143 (Shkrob et al. (2005) Biochem J. 392(Pt 3): 649-54)
Entacmaea eqFP611 (Wiedenmann et al. (2002) PNAS USA. 99(18): 11646-51)
Discosoma variants

mPlum (Wang et al.. (2004) PNAS USA.101(48): 16745-9)
mRasberry (Wang et al. (2004) PNAS USA.101(48): 16745-9)
Heteractis HcRed1 and t-HcRed (Clontech, Palo Alto, CA)

IFP (infrared fluorescent protein)
near-infrared fluorescent protein
YFP

EYFP (Clontech, Palo Alto, CA)
YPet (Nguyen and Daugherty (2005) Nat Biotechnol. 23(3): 355-60)
Venus (Nagai et al. (2002) Nat. Biotechnol. 20(1): 87-90)
ZsYellow (Clontech, Palo Alto, CA)
mCitrine (Wang et al. (2004) PNAS USA.101(48): 16745-9)

OFP

cOFP (Stratagene, La Jolla, CA)
mKO (MBL International, Woburn, MA)
mOrange (Wang et al.. (2004) PNAS USA.101(48): 16745-9)

CFP

Cerulean (Rizzo (2004) Nat Biotechnol. 22(4): 445-9)
mCFP (Wang et al. (2004) PNAS USA.101(48): 16745-9)
AmCyan1 (Clontech, Palo Alto, CA)
MiCy (MBL International, Woburn, MA)
CyPet (Nguyen and Daugherty (2005) Nat Biotechnol. 23(3): 355-60)

BFP

EBFP (Clontech, Palo Alto, CA);
phycobiliproteins from certain cyanobacteria and eukaryotic algae, phycoerythrins (red)
and the phycocyanins (blue)

R-Phycoerythrin (R-PE)
B-Phycoerythrin (B-PE)
Y-Phycoerythrin (Y-PE)
C-Phycocyanin (P-PC)
R-Phycocyanin (R-PC)
Phycoerythrin 566 (PE 566)
Phycoerythrocyanin (PEC)
Allophycocyanin (APC)
frp Flavin Reductase
CBP Coelenterazine-binding protein 1
PET imaging

Cyp11B1 transcript variant 1
Cyp11B1 transcript variant 2
Cyp11B2
AlstR
PEPR-1
LAT-4 (SLC43A2)
Cyp51 transcript variant 1
Cyp51 transcript variant 2

Transporter proteins
Solute carrier transporter protein families (SLC)

SLC1 solute carrier 1 transporter protein family
SLC1A1, SLC1A2, SLC1A3, SLC1A4, SLC1A5, SLC1A6, SLC1A7
SLC2 solute carrier 2 transporter protein family
SLC2A1, SLC2A2, SLC2A3, SLC2A4, SLC2A5, SLC2A6, SLC2A7, SLC2A8, SLC2A9,
SLC2A10, SLC2A11, SLC2A12, SLC2A13, SLC2A14)
SLC3 solute carrier 3 transporter protein family
SLC3A1, SLC3A2
SLC 4 solute carrier 4 transporter protein family
SLC4A1, SLC4A2, SLC4A3, SLC4A4, SLC4A5, SLC4A6, SLC4A7, SLC4A8, SLC4A9,
SLC4A10, SLC4A11
SLC5 solute carrier 5 transporter protein family
SLC5A1 sodium/glucose cotransporter 1
SLC5A2 sodium/glucose cotransporter 2
SLC5A3 sodium/myo-inositol cotransporter
SLC5A4 low affinity sodium-glucose cotransporter
SLC5A5 sodium/iodide cotransporter
SLC5A6 sodium-dependent multivitamin transporter
SLC5A7 high affinity choline transporter 1
SLC5A8 sodium-coupled monocarboxylate transporter 1
SLC5A9 sodium/glucose cotransporter 4
SLC5A10 sodium/glucose cotransporter 5, isoform 1
sodium/glucose cotransporter 5, isoform 2
sodium/glucose cotransporter 5, isoform 3
sodium/glucose cotransporter 5, isoform 4
SLC5A11 sodium/myo-inositol cotransporter 2, isoform 1
sodium/myo-inositol cotransporter 2, isoform 2
sodium/myo-inositol cotransporter 2, isoform 3
sodium/myo-inositol cotransporter 2, isoform 4
SLC5A12 sodium-coupled monocarboxylate transporter 2, isoform 1
sodium-coupled monocarboxylate transporter 2, isoform 2

Sodium Iodide Symporter (NIS)
hNIS (NM_000453)
hNIS (BC105049)
hNIS (BC105047)
hNIS (non-functional hNIS variant containing an additional 11 aa)

SLC6 solute carrier 6 transporter protein family
SLC6A1 sodium- and chloride-dependent GABA transporter 1
SLC6A2 norepinephrine transporter (sodium-dependent noradrenaline transporter)
SLC6A3 sodium-dependent dopamine transporter
SLC6A4 sodium-dependent serotonin transporter
SLC6A5 sodium- and chloride-dependent glycine transporter 1
SLC6A6 sodium-and chloride-dependent taurine transporter
SLC6A7 sodium-dependent proline transporter
SLC6A8 sodium- and chloride-dependent creatine transporter
SLC6A9 sodium- and chloride-dependent glycine transporter 1, isoform 1
sodium- and chloride-dependent glycine transporter 1, isoform 2
sodium- and chloride-dependent glycine transporter 1, isoform 3
SLC6A10 sodium- and chloride-dependent creatine transporter 2
SLC6A11 sodium- and chloride-dependent GABA transporter 3
SLC6A12 sodium- and chloride-dependent betaine transporter
SLC6A13 sodium- and chloride-dependent GABA transporter 2
SLC6A14 Sodium- and chloride-dependent neutral and basic amino acid transporter B(0+)
SLC6A15 Orphan sodium- and chloride-dependent neurotransmitter transporter NTT73
SLC6A16 Orphan sodium- and chloride-dependent neurotransmitter transporter NTT5
SLC6A17 Orphan sodium- and chloride-dependent neurotransmitter transporter NTT4
Sodium SLC6A18 Sodium- and chloride-dependent transporter XTRP2
SLC6A19 Sodium-dependent neutral amino acid transporter B(0)
SLC6A20 Sodium- and chloride-dependent transporter XTRP3
Norepinephrine Transporter (NET)

Human Net (hNET) transcript variant 1 (NM_001172504)
Human Net (hNET) transcript variant 2 (NM_001172501)
Human Net (hNET) transcript variant 3 (NM_001043)
Human Net (hNET) transcript variant 4 (NM_001172502)
Non-Human Net

SLC7 solute carrier 7 transporter protein family
SLC7A1, SLC7A2, SLC7A3, SLC7A4, SLC7A5, SLC7A6, SLC7A7, SLC7A8, SLC7A9,
SLC7A10, SLC7A11, SLC7A13, SLC7A14
SLC8 solute carrier 8 transporter protein family
SLC8A1, SLC8A2, SLC8A3
SLC9 solute carrier 9 transporter protein family
SLC9A1, SLC9A2, SLC9A3, SLC9A4, SLC9A5, SLC9A6, SLC9A7, SLC9A8, SLC9A9,
SLC9A10, SLC9A11
SLC10 solute carrier 10 transporter protein family
SLC10A1, SLC10A2, SLC10A3, SLC10A4, SLC10A5, SLC10A6, SLC10A7
SLC11 solute carrier 11 transporter protein family
SLC11A1
SCL11A2 or hDMT

SLC11A2 transcript variant 4
SLC11A2 transcript variant 1
SLC11A2 transcript variant 2
SLC11A2 transcript variant 3
SLC11A2 transcript variant 5
SLC11A2 transcript variant 6
SLC11A2 transcript variant 7

SLC12 solute carrier 12 transporter protein family
SLC12A1, SLC12A1, SLC12A2, SLC12A3, SLC12A4, SLC12A5, SLC12A6, SLC12A7,
SLC12A8, SLC12A9
SLC13 solute carrier 13 transporter protein family
SLC13A1, SLC13A2, SLC13A3, SLC13A4, SLC13A5
SLC14 solute carrier 14 transporter protein family
SLC14A1, SLC14A2
SLC15 solute carrier 15 transporter protein family
SLC15A1, SLC15A2, SLC15A3, SLC15A4
SLC16 solute carrier 16 transporter protein family
SLC16A1, SLC16A2, SLC16A3, SLC16A4, SLC16A5, SLC16A6, SLC16A7, SLC16A8,
SLC16A9, SLC16A10, SLC16A11, SLC16A12, SLC16A13, SLC16A14
SLC17 solute carrier 17 transporter protein family
SLC17A1, SLC17A2, SLC17A3, SLC17A4, SLC17A5, SLC17A6, SLC17A7, SLC17A8
SLC18 solute carrier 18 transporter protein family
SLC18A1, SLC18A2, SLC18A3
SLC19 solute carrier 19 transporter protein family
SLC19A1, SLC19A2, SLC19A3
SLC20 solute carrier 20 transporter protein family
SLC20A1, SLC20A2
SLC21 solute carrier 21 transporter protein family

subfamily 1; SLCO1A2, SLCO1B1, SLCO1B3, SLCO1B4, SLCO1C1
subfamily 2; SLCO2A1, SLCO2B1
subfamily 3; SLCO3A1
subfamily 4; SLCO4A1, SLCO4C1
subfamily 5; SLCO5A1

SLC22 solute carrier 22 transporter protein family
SLC22A1, SLC22A2, SLC22A3, SLC22A4, SLC22A5, SLC22A6, SLC22A7, SLC22A8,
SLC22A9, SLC22A10, SLC22A11, SLC22A12, SLC22A13, SLC22A14, SLC22A15,
SLC22A16, SLC22A17, SLC22A18, SLC22A19, SLC22A20
SLC23 solute carrier 23 transporter protein family
SLC23A1, SLC23A2, SLC23A3, SLC23A4
SLC24 solute carrier 24 transporter protein family
SLC24A1, SLC24A2, SLC24A3, SLC24A4, SLC24A5, SLC24A6
SLC25 solute carrier 25 transporter protein family
SLC25A1, SLC25A2, SLC25A3, SLC25A4, SLC25A5, SLC25A6, SLC25A7, SLC25A8,
SLC25A9, SLC25A10, SLC25A11, SLC25A12, SLC25A13, SLC25A14, SLC25A15,
SLC25A16, SLC25A17, SLC25A18, SLC25A19, SLC25A20, SLC25A21, SLC25A22,
SLC25A23, SLC25A24, SLC25A25, SLC25A26, SLC25A27, SLC25A28, SLC25A29,
SLC25A30, SLC25A31, SLC25A32, SLC25A33, SLC25A34, SLC25A35, SLC25A36,
SLC25A37, SLC25A38, SLC25A39, SLC25A40, SLC25A41, SLC25A42, SLC25A43,
SLC25A44, SLC25A45, SLC25A46
SLC26 solute carrier 26 transporter protein family
SLC26A1, SLC26A2, SLC26A3, SLC26A4, SLC26A5, SLC26A6, SLC26A7, SLC26A8,
SLC26A9, SLC26A10, SLC26A11
SLC27 solute carrier 27 transporter protein family
SLC27A1, SLC27A2, SLC27A3, SLC27A4, SLC27A5, SLC27A6
SLC28 solute carrier 28 transporter protein family
SLC28A1, SLC28A2, SLC28A3
SLC29 solute carrier 29 transporter protein family
SLC29A1, SLC29A2, SLC29A3, SLC29A4
SLC30 solute carrier 30 transporter protein family
SLC30A1, SLC30A2, SLC30A3, SLC30A4, SLC30A5, SLC30A6, SLC30A7, SLC30A8,
SLC30A9, SLC30A10
SLC31 solute carrier 31 transporter protein family
SLC31A1
SLC32 solute carrier 32 transporter protein family
SLC32A1
SLC33 solute carrier 33 transporter protein family
SLC33A1
SLC34 solute carrier 34 transporter protein family
SLC34A1, SLC34A2, SLC34A3
SLC35 solute carrier 35 transporter protein family

subfamily A; SLC35A1, SLC35A2, SLC35A3, SLC35A4, SLC35A5
subfamily B; SLC35B1, SLC35B2, SLC35B3, SLC35B4
subfamily C; SLC35C1, SLC35C2
subfamily D; SLC35D1, SLC35D2, SLC35D3
subfamily E; SLC35E1, SLC35E2, SLC35E3, SLC35E4

SLC36 solute carrier 36 transporter protein family
SLC36A1, SLC36A2, SLC36A3, SLC36A4
SLC37 solute carrier 37 transporter protein family
SLC37A1, SLC37A2, SLC37A3, SLC37A4
SLC38 solute carrier 38 transporter protein family
SLC38A1, SLC38A2, SLC38A3, SLC38A4, SLC38A5, SLC38A6
SLC39 solute carrier 39 transporter protein family
SLC39A1, SLC39A2, SLC39A3, SLC39A4, SLC39A5, SLC39A6, SLC39A7, SLC39A8,
SLC39A9, SLC39A10, SLC39A11, SLC39A12, SLC39A13, SLC39A14
SLC40 solute carrier 40 transporter protein family
SLC40A1
SLC41 solute carrier 41 transporter protein family
SLC41A1, SLC41A2, SLC41A3
SLC42 solute carrier 42 transporter protein family
RHAG, RhBG, RhCG
SLC43 solute carrier 43 transporter protein family
SLC43A1
SLC43A2
SLC43A3
SLC44 solute carrier 44 transporter protein family
SLC44A1, SLC44A2, SLC44A3, SLC44A4, SLC44A5
SLC45 solute carrier 45 transporter protein family
SLC45A1, SLC45A2, SLC54A3, SLC45A4
SLC46 solute carrier 46 transporter protein family
SLC46A1, SLC46A2
SLC47 solute carrier 47 transporter protein family
SLC47A1, SLC47A2

MRI Imaging

Human transferrin receptor
Human transferrin receptor
Mouse transferrin receptor
Human ferritin light chain (FTL)
Human ferritin heavy chain
FTL 498-199InsTC, a mutated form of the ferritin light chain
Bacterial ferritin

E. coli
E. coli strain K12
S. aureus strain MRSA252
S. aureus strain NCTC 8325
H. pylori B8

bacterioferritin
codon optimized bacterioferritin
MagA

Enzymes that modify a substrate to produce a detectable product or signal, or are detectable
by antibodies

alpha-amylase
alkaline phosphatase
secreted alkaline phosphatase
peroxidase
T4 lysozyme
oxidoreductase
pyrophosphatase

Therapeutic genes
therapeutic gene product
antigens

tumor specific antigens
tumor-associated antigens
tissue-specific antigens
bacterial antigens
viral antigens
yeast antigens
fungal antigens
protozoan antigens
parasite antigens
mitogens

an antibody or fragment thereof
virus-specific antibodies
antisense RNA
siRNA

siRNA directed against expression of a tumor-promoting gene

an oncogene
growth factor
angiogenesis promoting gene
a receptor

siRNA molecule directed against expression of any gene essential for cell growth, cell
replication or cell survival.
siRNA molecule directed against expression of any gene that stabilizes the cell membrane
or otherwise limits the number of tumor cell antigens released from the tumor cell.

protein ligands
an antitumor oligopeptide
an antimitotic peptide

tubulysin,
phomopsin
hemiasterlin
taltobulin (HTI-286, 3)
cryptophycin

a mitosis inhibitor protein
an antimitotic oligopeptide
an anti-cancer polypeptide antibiotic
anti-cancer antibiotics

tissue factors

Tissue Factor (TF)
αvβ3-integrin RGD fusion protein

Immune modulatory molecules

GM-CSF
MCP-1 or CCL2 (Monocyte Chemoattractant Protein-1) Human
MCP-1 murine
IP-10 or Chemokine ligand 10 (CXCL10)
LIGHT
P60 or SEQSTM1 (Sequestosome 1 transcript variant 1)
P60 or SEQSTM1 (Sequestosome 1 transcript variant 3)
P60 or SEQSTM1 (Sequestosome 1 transcript variant 2)
OspF
OspG
STAT1alpha
STAT1beta

Interleukins

IL-18 (Interleukin-18)
IL-11 (Interleukin-11)
IL-6 (Interleukin-6)
sIL-6R-IL-6
interleukin-12
interleukin-1
interleukin-2
IL-24 (Interleukin-24)
IL-24 transcript variant 1
IL-24 transcript variant 4
IL-24 transcript variant 5
IL-4
IL-8
IL-10

chemokines

IP-10 (CXCL)
Thrombopoietin
members of the C—X—C and C-C chemokine families
RANTES
MIP1-alpha
MIP1-beta
MIP-2

CXC chemokines

GROα
GROβ (MIP-2)
GROγ
ENA-78
LDGF-PPBP
GCP-2
PF4
Mig
IP-10
SDF-1α/β
BUNZO/STRC33
I-TAC
BLC/BCA-1
MDC
TECK
TARC
HCC-1
HCC-4
DC-CK1
MIP-3α
MIP-3β
MCP-2
MCP-3 (Monocyte Chemoattractant Protein-3, CCL7)
MCP-4
MCP-5 (Monocyte Chemoattractant Protein-5; CCL12)
Eotaxin (CCL11)
Eotaxin-2/MPIF-2
I-309
MIP-5/HCC-2
MPIF-1
6Ckine
CTACK
MEC
lymphotactin
fractalkine

Immunoglobulin superfamily of cytokines

B7.1
B7.2

Anti-angiogenic genes/angiogenesis inhibitors

Human plasminogen k5 domain (hK5)
PEDF (SERPINF1) (Human)
PEDF (mouse)
anti-VEGF single chain antibody (G6)
anti-DLL4 s.c. antibody GLAF-3
tTF-RGD (truncated human tissue factor protein fused to an RGD peptide)

viral attenuation factors

Interferons

IFN-γ
IFN-α
IFN-β

Antibody or scFv

Therapeutic antibodies (i.e. anticancer antibodies)

Rituximab (RITUXAN)
ADEPT
Trastuzumab (Herceptin)
Tositumomab (Bexxar)
Cetuximab (Erbitux)
Ibritumomab (90Y-Ibritumomab tiuxetan; Zevalin)
Alemtuzumab (Campath-1H)
Epratuzumab (Lymphocide)
Gemtuzumab ozogamicin (Mylotarg)
Bevacizumab (Avastin) and Edrecolomab (Panorex)
Infliximab

Metastasis suppressor genes

NM23 or NME1 Isoform a
NM23 or NME1 Isoform b

Anti-metastatic genes

E-Cad
Gelsolin
LKB1 (STK11)
RASSF1
RASSF2
RASSF3
RASSF4
RASSF5
RASSF6
RASSF7
RASSF8
Syk
TIMP-1 (Tissue Inhibitor of Metalloproteinase Type-1)
TIMP-2 (Tissue Inhibitor of Metalloproteinase Type-2)
TIMP-3 (Tissue Inhibitor of Metalloproteinase Type-3)
TIMP-4 (Tissue Inhibitor of Metalloproteinase Type-4)
BRMS-1
CRMP-1
CRSP3
CTGF
DRG1
KAI1
KiSS1 (kisspeptin)
kisspeptin fragments

kisspeptin-10
kisspeptin-13
kisspeptin-14
kisspeptin-54

Mkk4
Mkk6
Mkk7
RKIP
RHOGDI2
SSECKS
TXNIP/VDUP1

Cell matrix-degradative genes

Relaxin 1
hMMP9

Hormones

Human Erythropoietin (EPO)

MicroRNAs

pre-miRNA 181a (sequence inserted into viral genome)
miRNA 181a
mmu-miR-181a MIMAT0000210 mature miRNA 181a
pre-miRNA 126 (sequence inserted into the vial genome)
miRNA 126
hsa-miR-126 MI000471
hsa-miR-126 MIMAT0000445
pre-miRNA 335 (sequence inserted into the viral genome)
miRNA 335
hsa-miR-335 MI0000816
hsa-miR-335 MIMAT0000765

Genes for tissue regeneration and reprogramming Human somatic cells to pluripotency

nAG
Oct4
NANOG
Ngn (Neogenin 1) transcript variant 1
Ngn (Neogenin 1) transcript variant 2
Ngn (Neogenin 1) transcript variant 3
Ngn3
Pdx1
Mafa

Additional Genes

Myc-CTR1
FCU1
mMnSOD
HACE1
nppa1
GCP-2 (Granulocyte Chemotactic Protein-2, CXCL6)
hADH
Wildtype CDC6
Mut CDC6
GLAF-3 anti-DLL4 scFv
GLAF-4 anti-FAP (Fibroblast Activation Protein) scFv (Brocks et al., (2001) Mol.
Medicine 7(7): 461-469)
GLAF-5 anti-FAP scFv
BMP4
wildtype F14.5L

Other Proteins

WT1
p53
Pseudomonas exotoxin
diphtheria toxin
Arf or p16
Bax
Herpes simplex virus thymidine kinase
E. coli purine nucleoside phosphorylase
angiostatin
endostatin
Rb
BRCA1
cystic fibrosis transmembrane regulator (CFTR)
Factor VIII
low density lipoprotein receptor
alpha-galactosidase
beta-glucocerebrosidase
insulin
parathyroid hormone
alpha-1-antitrypsin
rsCD40L
Fas-ligand
TRAIL
TNF
microcin E492
xanthine guanine phosphoribosyltransferase (XGPRT)
E. coli guanine phosphoribosyltransferase (gpt)
hyperforin
endothelin-1 (ET-1)
connective tissue growth factor (CTGF)
vascular endothelial growth factor (VEGF)
cyclooxygenase
COX-2
cyclooxygenase-2 inhibitor
MPO (Myeloperoxidase)
Apo A1 (Apolipoprotein A1)
CRP (C Reactive Protein)
Fibrinogen
SAP (Serum Amyloid P)
FGF-basic (Fibroblast Growth Factor-basic)
PPAR-agonist
PE37/TGF-alpha fusion protein

Replacement of the A34R gene with another A34R gene from a different strain in order to
increase the EEV form of the virus

A34R from VACV IHD-J
A34R with a mutation at codon 151 (Lys 151 to Asp)
A34R with a mutation at codon 151 (Lys 151 to Glu)

Non-coding Sequence

Non-proteins
Non-coding nucleic acid

Ribozymes

Group I introns
Group II introns
RNaseP
hairpin ribozymes
hammerhead ribozymes

Prodrug converting enzymes

varicella zoster thymidine kinase
cytosine deaminase
purine nucleoside phosphorylase (e.g., from E. coli)
beta lactamase
carboxypeptidase G2
carboxypeptidase A
cytochrome P450

cytochrome P450-2B1
cytochrome P450-4B1

horseradish peroxidase
nitroreductase
rabbit carboxylesterase
mushroom tyrosinase
beta galactosidase (lacZ) (i.e., from E. coli)
beta glucuronidase (gusA)
thymidine phosphorylase
deoxycytidine kinase
linamarase

Proteins detectable by antibodies

chloramphenicol acetyl transferase
hGH

Viral attenuation factors

virus-specific antibodies

mucins
thrombospondin

tumor necrosis factors (TNFs)

TNFα

Superantigens
Toxins

diphtheria toxin
Pseudomonas exotoxin
Escherichia coli Shiga toxin
Shigella toxin
Escherichia coli Verotoxin 1
Toxic Shock Syndrome Toxin 1
Exfoliating Toxins (EXft)
Streptococcal Pyrogenic Exotoxin (SPE) A, B and C
Clostridial Perfringens Enterotoxin (CPET)
staphylococcal enterotoxins
SEA, SEB, SEC1, SEC2, SED, SEE and SEH
Mouse Mammary Tumor Virus proteins (MMTV)
Streptococcal M proteins
Listeria monocytogenes antigen p60
mycoplasma arthritis superantigens

Proteins that can bind a contrasting agent, chromophore, or a compound or ligand that can be
detected

siderophores

enterobactin
salmochelin
yersiniabactin
aerobactin

Growth Factors

platelet-derived growth factor (PDG-F)
keratinocyte growth factor (KGF)
insulin-like growth factor-1 (IGF-1)
insulin-like growth factor-binding proteins (IGFBPs)
transforming growth factor (TGF-alpha)
Growth factors for blood cells

Granulocyte Colony Stimulating Factor (G-CSF)

growth factors that can boost platelets

Other Groups

BAC (Bacterial Artificial Chromosome) encoding several or all proteins of a specific

pathway, e.g. wound healing-pathway

MAC (Mammalian Artificial Chromosome) encoding several or all proteins of a specific

pathway, e.g. wound healing-pathway

tumor antigen
RNAi
ligand binding proteins
proteins that can induce a signal detectable by MRI
angiogenins
photosensitizing agents
anti-metabolites
signaling modulators
chemotherapeutic compounds
lipases
proteases
pro-apoptotic factors
anti-cancer vaccine

antigen vaccines
whole cell vaccines (i.e., dendritic cell vaccines)
DNA vaccines
anti-idiotype vaccines

tumor suppressors
cytotoxic protein
cytostatic proteins
costimulatory molecules

cytokines and chemokines

cancer growth inhibitors
gene therapy
BCG vaccine for bladder cancer

Proteins that interact with host cell proteins

[0269] i. Diagnostic or Reporter Gene Products

[0270] In some examples, the viruses provided herein contain nucleic acids that encode a detectable protein or a protein capable of inducing a detectable signal. Expression of such proteins allows detection of the virus in vitro and in vivo. A variety of detectable gene products, such as detectable proteins are known in the art, and can be used with the viruses provided herein.

[0271] Exemplary of such proteins are enzymes that can catalyze a detectable reaction or catalyze formation of a detectable product, such as, for example, luciferases, such as a click beetle luciferase, a Renilla luciferase, a firefly luciferase or beta-glucuronidase (GusA). Also exemplary of such proteins are proteins that emit a detectable signal, including fluorescent proteins, such as a green fluorescent protein (GFP) or a red fluorescent protein (RFP). A variety of DNA sequences encoding proteins that can emit a detectable signal or that can catalyze a detectable reaction, such as luminescent or fluorescent proteins, are known and can be used in the viruses and methods provided herein. Transformation and expression of these genes in viruses can permit detection of viral infection, for example, using a low light and/or fluorescence imaging camera.

[0272] Exemplary genes encoding light-emitting proteins include, for example, genes from bacterial luciferase from Vibrio harveyi (Belas et al., Science 218 (1982), 791-793), bacterial luciferase from Vibrio fischeri (Foran and Brown, Nucleic acids Res. 16 (1988), 177), firefly luciferase (de Wet et al., (1987) Mol. Cell. Biol. 7:725-737), aequorin from Aequorea victoria (Prasher et al., (19897) Biochem. 26:1326-1332), Renilla luciferase from Renilla reniformis (Lorenz et al, (1991) Proc Natl Acad Sci USA 88:4438-4442). The luxA and luxB genes of bacterial luciferase can be fused to produce the fusion gene (Fab₂), which can be expressed to produce a fully functional luciferase protein (Escher et al., (1989) Proc Natl Acad Sci USA 86:6528-6532). In some examples, luciferases expressed by viruses can require exogenously added substrates such as decanal or coelenterazine for light emission. In other examples, viruses can express a complete lux operon, which can include proteins that can provide luciferase substrates such as decanal. For example, viruses containing the complete lux operon sequence, when injected intraperitoneally, intramuscularly, or intravenously, allowed the visualization and localization of microorganisms in live mice indicating that the luciferase light emission can penetrate the tissues and can be detected externally (Contag et al. (1995) Mol. Microbiol. 18: 593-603).

[0273] Exemplary fluorescent proteins include green fluorescent protein from Aequorea victoria (Prasher et al., Gene 111: 229-233 (1987), and GFP variants and variants of GFP-like proteins. Such fluorescent proteins include monomeric, dimeric and tetrameric fluorescent proteins. Exemplary monomeric fluorescent proteins include, but are not limited to: violet fluorescent proteins, such as for example, Sirius; blue fluorescent proteins, such as for example, Azurite, EBFP, SBFP2, EBFP2, TagBFP; cyan fluorescent proteins, such as for example, mTurquoise, eCFP, Cerulean (Rizzo, (2004) Nat. Biotechnol. 22(4):445-449), SCFP, TagCFP, mTFP1, mCFP, AmCyan1, MiCy, CyPet (Nguyen and Daugherty, (2005) Nat Biotechnol. 23(3):355-360); green fluorescent proteins, such as for example, GFP, mUkG1, aAG1, AcGFP1, TagGFP2, EGFP, mWasabi, EmGFP (Emerald), Azami-Green, Kaede, ZsGreen1 and CopGFP; yellow fluorescent proteins, such as for example; TagYFP, EYFP, Topaz, SYFP2, YPet (Nguyen and Daugherty, (2005) Nat. Biotechnol. 23(3):355-360), Venus (Nagai et al. (2002) Nat. Biotechnol. 20(1):87-90), mCitrine; orange fluorescent proteins, such as for example, cOFP, mKO, mKO2, mOrange, mOrange2, red fluorescent proteins, such as for example, Discosoma RFP (DsRed) isolated from the corallimorph Discosoma (Matz et al. (1999) Nature Biotechnology 17: 969-973), mRFP1, TagRFP, TagRFPt, Discosoma variants mStrawberry, mRuby, mCherry, tdTomato, mTangerine, DsRed2, DsRed-T1 (Bevis and Glick, (2002) Nat. Biotechnol., 20: 83-87), Anthomedusae J-Red, Anemonia AsRed2; far red fluorescent proteins, such as for example, Actinia AQ143 (Shkrob et al. (2005) Biochem J. 392(Pt 3):649-54), Entacmaea eqFP611 (Wiedenmann et al. (2002) Proc. Natl. Acad. Sci. USA. 99(18):11646-11651), Discosoma variants mRasberry, mKate2, mPlum, and mNeptune, Heteractis HcRed1 and t-HcRed; and fluorescent proteins having an increased stokes shift (i.e. >100 nm distance between excitation and emission spectra), such as for example, Sapphire, T-Sapphire, mAmetrine, and mKeima; Near-infrared FPs, such as and IFP1.4 (Scherbo et al. (2007) Nat Methods 4:741-746), eqFP650 and eqFP670. Exemplary dimeric and tetrameric fluorescent proteins include, but are not limited to: AmCyan1, Midori-Ishi Cyan, copGFP (ppluGFP2), TurboGFP, ZsGreen, TurboYFP, ZsYellow1, TurboRFP, tdTomato, DsRed2, DsRed-Express, DsRed-Express2, DsRed-Max, AsRed2, TurboFP602, RFP611, Katushka (TurboFP635), Katushka2, and AQ143. Excitation and emission spectra for exemplary fluorescent proteins are well-known in the art (see also e.g. Chudakov et al. (2010) Physiol Rev 90, 1102-1163).

[0274] Exemplary detectable proteins also include proteins that can bind a contrasting agent, chromophore, or a compound or ligand that can be detected, such as a transferrin receptor or a ferritin; and reporter proteins, such as E. coli β-galactosidase, β-glucuronidase, xanthine-guanine phosphoribosyltransferase (gpt).

[0275] Also exemplary of detectable proteins are gene products that can specifically bind a detectable compound, including, but not limited to receptors, metal binding proteins (e.g., siderophores, ferritins, transferrin receptors), ligand binding proteins, and antibodies. Also exemplary of detectable proteins are transporter proteins that can bind to and transport detectable molecules. Such molecules can be used for detection of the virus, such as for applications involving imaging. Any of a variety of detectable compounds can be used, and can be imaged by any of a variety of known imaging methods. Exemplary compounds include receptor ligands and antigens for antibodies. The ligand can be labeled according to the imaging method to be used. Exemplary imaging methods include, but are not limited to, X-rays, magnetic resonance methods, such as magnetic resonance imaging (MRI) and magnetic resonance spectroscopy (MRS), and tomographic methods, including computed tomography (CT), computed axial tomography (CAT), electron beam computed tomography (EBCT), high resolution computed tomography (HRCT), hypocycloidal tomography, positron emission tomography (PET), single-photon emission computed tomography (SPECT), spiral computed tomography and ultrasonic tomography.

[0276] Labels appropriate for X-ray imaging are known in the art, and include, for example, Bismuth (III), Gold (III), Lanthanum (III) or Lead (II); a radioactive ion, such as ⁶⁷Copper, ⁶⁷Gallium, ⁶⁸Gallium, ¹¹¹Indium, ¹¹³Indium, ¹²³Iodine, ¹²⁵Iodine, ¹³¹Iodine, ¹⁹⁷Mercury, ²⁰³Mercury, ¹⁸⁶Rhenium, ¹⁸⁸Rhenium, ⁹⁷Rubidium, ¹⁰³Rubidium, ⁹⁹Technetium or ⁹⁰Yttrium; a nuclear magnetic spin-resonance isotope, such as Cobalt (II), Copper (II), Chromium (III), Dysprosium (III), Erbium (III), Gadolinium (III), Holmium (III), Iron (II), lion (III), Manganese (II), Neodymium (III), Nickel (II), Samarium (III), Terbium (III), Vanadium (II) or Ytterbium (III); or rhodamine or fluorescein.

[0277] Labels appropriate for magnetic resonance imaging are known in the art, and include, for example, gadolinium chelates and iron oxides. Use of chelates in contrast agents is known in the art. Labels appropriate for tomographic imaging methods are known in the art, and include, for example, β-emitters such as ¹¹C, ¹³N, ¹⁵O or ⁶⁴Cu or γ-emitters such as ¹²³I. Other exemplary radionuclides that can, be used, for example, as tracers for PET include ⁵⁵Co, ⁶⁷Ga, ⁶⁸Ga, ⁶⁰Cu(II), ⁶⁷Cu(II), ⁵⁷Ni, ⁵²Fe and ¹⁸F (e.g., ¹⁸F-fluorodeoxyglucose (FDG)). Examples of useful radionuclide-labeled agents are a ⁶⁴Cu-labeled engineered antibody fragment (Wu et al. (2002) PNAS USA 97: 8495-8500), ⁶⁴Cu-labeled somatostatin (Lewis et al. (1999) J. Med. Chem. 42: 1341-1347), ⁶⁴Cu-pyruvaldehyde-bis(N4-methylthiosemicarbazone) (⁶⁴Cu-PTSM) (Adonai et al. (2002) PNAS USA 99: 3030-3035), ⁵²Fe-citrate (Leenders et al. (1994) J. Neural. Transm. Suppl. 43: 123-132), ⁵²Fe/^{52m}Mn-citrate (Calonder et al. (1999) J. Neurochem. 73: 2047-2055) and ⁵²Fe-labeled iron (III) hydroxide-sucrose complex (Beshara et al. (1999) Br. J. Haematol. 104: 288-295, 296-302).

[0278] Exemplary of detectable proteins are transporter proteins that can bind to and transport detectable molecules, such as human epinephrine transporter (hNET) or sodium iodide symporter (NIS) that can bind to and transport detectable molecules, such as MIBG and other labeled molecules (e.g., Na¹²⁵I), into the cell.

[0279] The viruses can be modified for purposes of using the viruses for imaging, including for the purpose of dual imaging in vitro and/or in vivo to detect two or more detectable gene products, gene products that produce a detectable signal, gene products that can bind a detectable compound, or gene products that can bind other molecules to form a detectable product. In some examples, the two or more gene products are expressed by different viruses, whereas in other examples the two or more gene products are produced by the same virus. For example, a virus can express a gene product that emits a detectable signal and also express a gene product that catalyzes a detectable reaction. In other examples, a virus can express one or more gene products that emit a detectable signal, one or more gene products that catalyze a detectable reaction, one or more gene products that can bind a detectable compound or that can form a detectable product, or any combination thereof. Any combination of such gene products can be expressed by the viruses provided herein and can be used in combination with any of the methods provided herein. Imaging of such gene products can be performed, for example, by various imaging methods as described herein and known in the art (e.g., fluorescence imaging, MRI, PET, among many other methods of detection). Imaging of gene products can also be performed using the same method, whereby gene products are distinguished by their properties, such as by differences in wavelengths of light emitted. For example, a virus can express more than one fluorescent protein that differs in the wavelength of light emitted (e.g., a GFP and an RFP). In another non-limiting example, an RFP can be expressed with a luciferase. In yet other non-limiting examples, a fluorescent gene product can be expressed with a gene product, such as a ferritin or a transferrin receptor, used for magnetic resonance imaging. A virus expressing two or more detectable gene products or two or more viruses expressing two or more detectable gene products can be imaged in vitro or in vivo using such methods. In some examples the two or more gene products are expressed as a single polypeptide, such as a fusion protein. For example a fluorescent protein can be expressed as a fusion protein with a luciferase protein.

[0280] ii. Therapeutic Gene Products

[0281] The viruses for use in the methods provided herein can contain a heterologous nucleic acid molecule that encodes one or more therapeutic gene products. Therapeutic gene products include products that cause cell death or cause an anti-tumor immune response. A variety of therapeutic gene products, such as toxic or apoptotic proteins, or siRNA, are known in the art, and can be used with the viruses provided herein. The therapeutic genes can act by directly killing the host cell, for example, as a channel-forming or other lytic protein, or by triggering apoptosis, or by inhibiting essential cellular processes, or by triggering an immune response against the cell, or by interacting with a compound that has a similar effect, for example, by converting a less active compound to a cytotoxic compound.

[0282] Exemplary therapeutic gene products that can be expressed by the viruses provided herein include, but are not limited to, gene products (i.e., proteins and RNAs), including those useful for tumor therapy, such as, but not limited to, an anticancer agent, an antimetastatic agent, or an antiangiogenic agent. For example, exemplary proteins useful for tumor therapy include, but are not limited to, tumor suppressors, cytostatic proteins and costimulatory molecules, such as a cytokine, a chemokine, or other immunomodulatory molecules, an anticancer antibody, such as a single-chain antibody, antisense RNA, siRNA, prodrug converting enzyme, a toxin, a mitosis inhibitor protein, an antitumor oligopeptide, an anticancer polypeptide antibiotic, an angiogenesis inhibitor, or tissue factor. For example, a large number of therapeutic proteins that can be expressed for tumor treatment in the viruses and methods provided herein are known in the art, including, but not limited to, a transporter, a cell-surface receptor, a cytokine, a chemokine, an apoptotic protein, a mitosis inhibitor protein, an antimitotic oligopeptide, an antiangiogenic factor (e.g., hk5), angiogenesis inhibitors (e.g., plasminogen kringle 5 domain, anti-vascular endothelial growth factor (VEGF) scAb, tTF-RGD, truncated human tissue factor-αᵥβ₃-integrin RGD peptide fusion protein), anticancer antibodies, such as a single-chain antibody (e.g., an antitumor antibody or an antiangiogenic antibody, such as an anti-VEGF antibody or an anti-epidermal growth factor receptor (EGFR) antibody), a toxin, a tumor antigen, a prodrug converting enzyme, a ribozyme, RNAi, and siRNA.

[0283] Additional therapeutic gene products that can be expressed by the oncolytic reporter viruses include, but are not limited to, cell matrix degradative genes, such as but not limited to, relaxin-1 and MMP9, and genes for tissue regeneration and reprogramming human somatic cells to pluripotency, such as but not limited to, nAG, Oct4, NANOS, Neogenin-1, Ngn3, Pdx1 and Mafa.

[0284] Costimulatory molecules for the methods provided herein include any molecules which are capable of enhancing immune responses to an antigen/pathogen in vivo and/or in vitro. Costimulatory molecules also encompass any molecules which promote the activation, proliferation, differentiation, maturation or maintenance of lymphocytes and/or other cells whose function is important or essential for immune responses.

[0285] An exemplary, non-limiting list of therapeutic proteins includes tumor growth suppressors such as IL-24, WT1, p53, Pseudomonas exotoxin, diphtheria toxin, Arf, Bax, HSV TK, E. coli purine nucleoside phosphorylase, angiostatin and endostatin, p16, Rb, BRCA1, cystic fibrosis transmembrane regulator (CFTR), Factor VIII, low density lipoprotein receptor, beta-galactosidase, alpha-galactosidase, beta-glucocerebrosidase, insulin, parathyroid hormone, alpha-1-antitrypsin, rsCD40L, Fas-ligand, TRAIL, TNF, antibodies, microcin E492, diphtheria toxin, Pseudomonas exotoxin, Escherichia coli Shiga toxin, Escherichia coli Verotoxin 1, and hyperforin. Exemplary cytokines include, but are not limited to, chemokines and classical cytokines, such as the interleukins, including for example, interleukin-1, interleukin-2, interleukin-6 and interleukin-12, tumor necrosis factors, such as tumor necrosis factor alpha (TNF-α), interferons such as interferon gamma (IFN-γ), granulocyte macrophage colony stimulating factor (GM-CSF), erythropoietin and exemplary chemokines including, but not limited to CXC chemokines such as IL-8, GROα, GROβ, GROγ, ENA-78, LDGF-PBP, GCP-2, PF4, Mig, IP-10, SDF-1α/β, BUNZO/STRC33, I-TAC, BLC/BCA-1; CC chemokines such as MIP-1α, MIP-1β, MDC, TECK, TARC, RANTES, HCC-1, HCC-4, DC-CK1, MIP-3α, MIP-3β, MCP-1, MCP-2, MCP-3, MCP-4, Eotaxin, Eotaxin-2/MPIF-2, 1-309, MIP-5/HCC-2, MPIF-1, 6Ckine, CTACK, MEC; lymphotactin; and fractalkine. Exemplary other costimulatory molecules include immunoglobulin superfamily of cytokines, such as B7.1, B7.2.

[0286] Exemplary therapeutic proteins that can be expressed by the viruses provided herein and used in the methods provided herein include, but are not limited to, erythropoietin (e.g., SEQ ID NO:23), an anti-VEGF single chain antibody (e.g., SEQ ID NO:24), a plasminogen K5 domain (e.g., SEQ ID NO:25), a human tissue factor-αvβ3-integrin RGD fusion protein (e.g., SEQ ID NO:26), interleukin-24 (e.g., SEQ ID NO:27), or immune stimulators, such as SIL-6-SIL-6 receptor fusion protein (e.g., SEQ ID NO:28).

[0287] In some examples, the viruses provided herein can express one or more therapeutic gene products that are proteins that convert a less active compound into a compound that causes tumor cell death. Exemplary methods of conversion of such a prodrug compound include enzymatic conversion and photolytic conversion. A large variety of protein/compound pairs are known in the art, and include, but are not limited to, Herpes simplex virus thymidine kinase/ganciclovir, Herpes simplex virus thymidine kinase/(E)-5-(2-bromovinyl)-2′-deoxyuridine (BVDU), varicella zoster thymidine kinase/ganciclovir, varicella zoster thymidine kinase/BVDU, varicella zoster thymidine kinase/(E)-5-(2-bromovinyl)-1-beta-D-arabinofuranosyluracil (BVaraU), cytosine deaminase/5-fluorouracil, cytosine deaminase/5-fluorocytosine, purine nucleoside phosphorylase/6-methylpurine deoxyriboside, beta lactamase/cephalosporin-doxorubicin, carboxypeptidase G2/4-[(2-chloroethyl)(2-mesyloxyethyl)amino]benzoyl-L-glutamic acid (CMDA), carboxypeptidase A/methotrexate-phenylamine, cytochrome P450/acetaminophen, cytochrome P450-2B1/cyclophosphamide, cytochrome P450-4B1/2-aminoanthracene, 4-ipomeanol, horseradish peroxidase/indole-3-acetic acid, nitroreductase/CB 1954, rabbit carboxylesterase/7-ethyl-10-[4-(1-piperidino)-1-piperidino]carbonyloxy-camptothecin (CPT-11), mushroom tyrosinase/bis-(2-chloroethyl)amino-4-hydroxyphenylaminomethanone 28, beta galactosidase/1-chloromethyl-5-hydroxy-1,2-dihydro-3H-benz[e]indole, beta glucuronidase/epirubicin glucuronide, thymidine phosphorylase/5′-deoxy-5-fluorouridine, deoxycytidine kinase/cytosine arabinoside, and linamarase/linamarin.

[0288] Other therapeutic gene products that can be expressed by the viruses provided herein include siRNA and microRNA molecules. The siRNA and/or microRNA molecule can be directed against expression of a tumor-promoting gene, such as, but not limited to, an oncogene, growth factor, angiogenesis promoting gene, or a receptor. The siRNA and/or microRNA molecule also can be directed against expression of any gene essential for cell growth, cell replication or cell survival. The siRNA and/or microRNA molecule also can be directed against expression of any gene that stabilizes the cell membrane or otherwise limits the number of tumor cell antigens released from the tumor cell. Design of an siRNA or microRNA can be readily determined according to the selected target of the siRNA; methods of siRNA and microRNA design and down-regulation of genes are known in the art, as exemplified in U.S. Pat. Pub. Nos. 2003-0198627 and 2007-0044164, and Zeng et al., (2002) Molecular Cell 9:1327-1333.

[0289] Therapeutic gene products include viral attenuation factors, such as antiviral proteins. Antiviral proteins or peptides can be expressed by the viruses provided herein. Expression of antiviral proteins or peptides can control viral pathogenicity.

[0290] Exemplary viral attenuation factors include, but are not limited to, virus-specific antibodies, mucins, thrombospondin, and soluble proteins such as cytokines, including, but not limited to TNFα, interferons (for example IFNα, IFNβ, or IFNγ) and interleukins (for example IL-1, IL-12 or IL-18).

[0291] Another exemplary therapeutic gene product that can be expressed by the viruses provided herein is a protein ligand, such as antitumor oligopeptide. Antitumor oligopeptides are short protein peptides with high affinity and specificity to tumors. Such oligopeptides could be enriched and identified using tumor-associated phage libraries (Akita et al. (2006) Cancer Sci. 97(10):1075-1081). These oligopeptides have been shown to enhance chemotherapy (U.S. Pat. No. 4,912,199). The oligopeptides can be expressed by the viruses provided herein. Expression of the oligopeptides can elicit anticancer activities on their own or in combination with other chemotherapeutic agents. An exemplary group of antitumor oligopeptides is antimitotic peptides, including, but not limited to, tubulysin (Khalil et al. (2006) Chembiochem. 7(4):678-683), phomopsin, hemiasterlin, taltobulin (HTI-286, 3), and cryptophycin. Tubulysin is from myxobacteria and can induce depletion of cell microtubules and trigger the apoptotic process. The antimitotic peptides can be expressed by the viruses provide herein and elicit anticancer activities on their own or in combination with other therapeutic modalities.

[0292] Another exemplary therapeutic gene product that can be expressed by the viruses provided herein is an anti-metastatic agent that inhibits one or more steps of the metastatic cascade. The encoded anti-metastatic agents include agents that inhibit invasion of local tissue, inhibit intravasation into the bloodstream or lymphatics, inhibit cell survival and transport through the bloodstream or lymphatics as emboli or potentially single cells, inhibit cell lodging in microvasculature at the secondary site, inhibit growth into microscopic lesions and subsequently into overt metastatic lesions, and/or inhibit metastasis formation and growth within the primary tumor, where the inhibition of metastasis formation is not a consequence of inhibition of primary tumor growth.

[0293] Exemplary anti-metastatic agents expressed by the viruses provided herein can directly or indirectly inhibit one or more steps of the metastatic cascade. Exemplary anti-metastatic agents include, but are not limited to, the following: BRMS-1 (Breast Cancer Metastasis Suppressor 1), CRMP-1 (Collapsin Response Mediator Protein-1), CRSP-3 (Cofactor Required for Spl transcriptional activation subunit 3), CTGF (Connective Tissue Growth Factor), DRG-1 (Developmentally-regulated GTP-binding protein 1), E-Cad (E-cadherin), gelsolin, KAI1, KiSS1 (Kisspeptin 1/Metastin), kispeptin-10, kispeptin-13, kispeptin-14, kispeptin-54, LKB1 (STK11 (serine/threonine kinase 11)), JNKK1/MKK4 (c-Jun-NH2-Kinase Kinase/Mitogen activated Kinase Kinase 4), MKK6 (mitogen activated kinase kinase 6), MKK7 (mitogen activated kinase kinase 7), Nm23 (NDP Kinase A), RASSF1-8 (Ras association (RalGDS/AF-6) domain family members), RKIP (Raf kinase inhibitor protein), RhoGDI2 (Rho GDP dissociation inhibitor 2), SSECKS (src-suppressed C-kinase substrate), Syk, TIMP-1 (Tissue inhibitor of metalloproteinase-1), TIMP-2 (Tissue inhibitor of metalloproteinase-2), TIMP-3 (Tissue inhibitor of metalloproteinase-3), TIMP-4 (Tissue inhibitor of metalloproteinase-4), TXNIP/VDUP1 (Thioredoxin-interacting protein). Such list of anti-metastatic agents is not meant to be limiting. Any gene product that can suppress metastasis formation via a mechanism that is independent of inhibition of growth within the primary tumor is encompassed by the designation of an anti-metastatic agent or metastasis suppressor and can be expressed by a virus as provided herein. One of skill in the art can identify anti-metastatic genes and can construct a virus expressing one or more anti-metastatic genes for therapy.

[0294] Another exemplary therapeutic gene product that can be expressed by the viruses provided herein is a protein that sequesters molecules or nutrients needed for tumor growth. For example, the virus can express one or more proteins that bind iron, transport iron, or store iron, or a combination thereof. Increased iron uptake and/or storage by expression of such proteins not only, increases contrast for visualization and detection of a tumor or tissue in which the virus accumulates, but also depletes iron from the tumor environment. Iron depletion from the tumor environment removes a vital nutrient from the tumors, thereby deregulating iron hemostasis in tumor cells and delaying tumor progression and/or killing the tumor.

[0295] Additionally, iron, or other labeled metals, can be administered to a tumor-bearing subject, either alone, or in a conjugated form. An iron conjugate can include, for example, iron conjugated to an imaging moiety or a therapeutic agent. In some cases, the imaging moiety and therapeutic agent are the same, e.g., a radionuclide. Internalization of iron in the tumor, wound, area of inflammation or infection allows the internalization of iron alone, a supplemental imaging moiety, or a therapeutic agent (which can deliver cytotoxicity specifically to tumor cells or deliver the therapeutic agent for treatment of the wound, area of inflammation or infection). These methods can be combined with any of the other methods provided herein.

[0296] The administered virus also can be modified to stimulate humoral and/or cellular immune response in the subject, such as the induction of cytotoxic T lymphocytes responses. For example, the virus can provide prophylactic and therapeutic effects against a tumor infected by the virus or other infectious diseases, by rejection of cells from tumors or lesions using viruses that express immunoreactive antigens (Earl et al., Science 234: 728-831 (1986); Lathe et al., Nature (London) 32: 878-880 (1987)), cellular tumor-associated antigens (Bernards et al., Proc. Natl. Acad. Sci. USA 84: 6854-6858 (1987); Estin et al., Proc. Natl. Acad. Sci. USA 85: 1052-1056 (1988); Kantor et al., J. Natl. Cancer Inst. 84: 1084-1091 (1992); Roth et al., Proc. Natl. Acad. Sci. USA 93: 4781-4786 (1996)) and/or cytokines (e.g., IL-2, IL-12), costimulatory molecules (B7-1, B7-2) (Rao et al., J. Immunol. 156: 3357-3365 (1996); Chamberlain et al., Cancer Res. 56: 2832-2836 (1996); Oertli et al., J. Gen. Virol. 77: 3121-3125 (1996); Qin and Chatterjee, Human Gene Ther. 7: 1853-1860 (1996); McAneny et al., Ann. Surg. Oncol. 3: 495-500 (1996)), or other therapeutic proteins.

[0297] iii. Antigens

[0298] For example, the viruses provided herein can be modified to express one or more antigens. Sustained release of the antigen can result in an immune response by the viral-infected host, in which the host can develop antibodies against the antigen and/or the host can develop an immune response against cells expressing the antigen. Exemplary antigens include, but are not limited to, tumor specific antigens, tumor-associated antigens, tissue-specific antigens, bacterial antigens, viral antigens, yeast antigens, fungal antigens, protozoan antigens, parasite antigens and mitogens. Superantigens are antigens that can activate a large immune response, often brought about by a large response of T cells. A variety of superantigens are known in the art including, but not limited to, diphtheria toxin, staphylococcal enterotoxins (SEA, SEB, SEC1, SEC2, SED, SEE and SEH), Toxic Shock Syndrome Toxin 1, Exfoliating Toxins (EXft), Streptococcal Pyrogenic Exotoxin A, B and C(SPE A, B and C), Mouse Mammary Tumor Virus proteins (MMTV), Streptococcal M proteins, Clostridial Perfringens Enterotoxin (CPET), Listeria monocytogenes antigen p60, and mycoplasma arthritis superantigens.

[0299] Since many superantigens also are toxins, if expression of a virus of reduced toxicity is desired, the superantigen can be modified to retain at least some of its superantigenicity while reducing its toxicity, resulting in a compound such as a toxoid. A variety of recombinant superantigens and toxoids of superantigens are known in the art, and can readily be expressed in the viruses provided herein. Exemplary toxoids include toxoids of diphtheria toxin, as exemplified in U.S. Pat. No. 6,455,673 and toxoids of Staphylococcal enterotoxins, as exemplified in U.S. Pat. Pub. No. 2003-0009015.

[0300] iv. Modifications to Alter Attenuation of the Viruses

[0301] The toxicity of the viruses can be modulated. For example, viruses provided herein can be attenuated by addition, deletion and/or modification of nucleic acid in the viral genome. In particular, viruses can be attenuated by increasing transcriptional or translational load. In one example, the virus is attenuated by addition of heterologous nucleic acid that contains an open reading frame that encodes one or more gene products (e.g. a diagnostic gene product or a therapeutic gene product as described above). In another example, the virus is attenuated by modification of heterologous nucleic acid that contains an open reading frame that encodes one or more gene products. In a further example, the heterologous nucleic acid is modified by increasing the length of the open reading frame, removal of all or part of the open reading frame or replacement of all or part of the open reading frame. Such modifications can affect viral toxicity by disruption of one or more viral genes or by increasing or decreasing the transcriptional and/or translational load on the virus (see, e.g., International Patent Publication No. WO 2008/100292).

[0302] In another example, the virus can be attenuated by modification or replacement of one or more promoters contained in the virus. Such promoters can be replaced by stronger or weaker promoters, where replacement results in a change in the attenuation of the virus. In one example, a promoter of a virus provided herein is replaced with a natural promoter. In one example, a promoter of a virus provided herein is replaced with a synthetic promoter. Exemplary promoters that can replace a promoter contained in a virus can be a viral promoter, such as a vaccinia viral promoter, and can include a vaccinia early, intermediate, early/late or late promoter. Additional exemplary viral promoters are provided herein and known in the art and can be used to replace a promoter contained in a virus.

[0303] In another example, the virus is attenuated by modification of a heterologous nucleic acid contained in the virus by removal or all or a portion of a first heterologous nucleic acid molecule and replacement by a second heterologous nucleic acid molecule, where replacement changes the level of attenuation of the virus. The second heterologous nucleic acid molecule can contain a sequence of nucleotides that encodes a protein or can be a non-coding nucleic acid molecule. In some examples, the second heterologous nucleic acid molecule contains an open reading frame operably linked to a promoter. The second heterologous nucleic acid molecule can contain one or more open reading frames or one or more promoters. Further, the one or more promoters of the second heterologous nucleic acid molecule can be one or more stronger promoters or one or more weaker promoters, or can be a combination or both.

[0304] Attenuated vaccinia viruses are known in the art and are described, for example, in U.S. Patent Pub. Nos. US 2005-0031643 now U.S. Pat. Nos. 7,588,767, 7,588,771 and 7,662,398, US 2008-0193373, US 2009-0098529, US 2009-0053244, US 2009-0155287, US 2009-0081639, US 2009-0117034 and US 2009-0136917, and International Patent Pub. Nos. WO 2005/047458, WO 2008/100292 and WO 2008/150496.

[0305] Viruses provided herein also can contain a modification that alters its infectivity or resistance to neutralizing antibodies. In one non-limiting example deletion of the A35R gene in a vaccinia LIVP strain can decrease the infectivity of the virus. In some examples, the viruses provided herein can be modified to contain a deletion of the A35R gene. Exemplary methods for generating such viruses are described in PCT Publication No. WO2008/100292, which describes vaccinia LIVP viruses GLV-1j87, GLV-1j88 and GLV-1j89, which contain deletion of the A35R gene.

[0306] In another non-limiting example, replacement of viral coat proteins (e.g., A34R, which encodes a viral coat glycoprotein) with coat proteins from either more virulent or less virulent virus strains can increase or decrease the clearance of the virus from the subject. In one example, the A34R gene in a vaccinia LIVP strain can be replaced with the A34R gene from vaccinia IHD-J strain. Such replacement can increase the extracellular enveloped virus (EEV) form of vaccinia virus and can increase the resistance of the virus to neutralizing antibodies.

[0307] b. Control of Heterologous Gene Expression

[0308] In some examples, the heterologous nucleic acid also can contain one or more regulatory sequences to regulate expression of an open reading frame encoding the heterologous RNA and/or protein. Suitable regulatory sequences which, for example, are functional in a mammalian host cell are well known in the art. Expression can also be influenced by one or more proteins or RNA molecules expressed by the virus. Gene regulatory elements, such as promoters and enhancers, possess cell type specific activities and can be activated by certain induction factors (e.g., hormones, growth factors, cytokines, cytostatic agents, irradiation, heat shock) via responsive elements. A controlled and restricted expression of these genes can be achieved using such regulatory elements as internal promoters to drive the expression of therapeutic genes in viral vector constructs.

[0309] For example, the one or more heterologous nucleic acid molecules can be operably linked to a promoter for expression of the heterologous RNA and/or protein. For example, a heterologous nucleic acid that is operably linked to a promoter is also called an expression cassette. Hence, viruses provided herein can have the ability to express one or more heterologous genes. Gene expression can include expression of a protein encoded by a gene and/or expression of an RNA molecule encoded by a gene. In some embodiments, the viruses provided herein can express exogenous genes at levels high enough that permit harvesting products of the exogenous genes from the tumor. Exemplary promoters for the expression of heterologous genes are known in the art. The heterologous nucleic acid can be operatively linked to a native promoter or a heterologous promoter that is not native to the virus. Any suitable promoters, including synthetic and naturally-occurring and modified promoters, can be used. Exemplary promoters include synthetic promoters, including synthetic viral and animal promoters. Native promoter or heterologous promoters include, but are not limited to, viral promoters, such as vaccinia virus and adenovirus promoters.

[0310] In one example, the promoter is a poxvirus promoter, such as, for example, a vaccinia virus promoter. Vaccinia viral promoters for the expression of one or more heterologous genes can be synthetic or natural promoters, and include vaccinia early, intermediate, early/late and late promoters. Exemplary vaccinia viral promoters for controlling heterologous gene expression include, but are not limited to, P_{7.5k}, P₁₁ₖ, P_{SE}, P_{SEL}, P_{SL}, H5R, TK, P28, C11R, G8R, F17R, 13L, 18R, A1L, A2L, A3L, H1L, H3L, H5L, H6R, H8R, D1R, D4R, D5R, D9R, D11L, D12L, D13L, M1L, N2L, P4b or K1 promoters. Other viral promoters include, but are not limited to, adenovirus late promoter, Cowpox ATI promoter, or T7 promoter. Strong late promoters can be used to achieve high levels of expression of the heterologous genes. Early and intermediate-stage promoters also can be used. In one example, the promoters contain early and late promoter elements, for example, the vaccinia virus early/late promoter P_{7.5k}, vaccinia late promoter P₁₁ₖ, a synthetic early/late vaccinia P_{SEL} promoter (Patel et al., (1988) Proc. Natl. Acad. Sci. USA 85:9431-9435; Davison and Moss, (1989) J Mol Biol 210:749-769; Davison et al. (1990) Nucleic Acids Res. 18:4285-4286; Chakrabarti et al. (1997), BioTechniques 23:1094-1097). The viruses provided herein can exhibit differences in characteristics, such as attenuation, as a result of using a stronger promoter versus a weaker promoter. For example, in vaccinia, synthetic early/late and late promoters are relatively strong promoters, whereas vaccinia synthetic early, P_{7.5k} early/late, P_{7.5k} early, and P₂₈ late promoters are relatively weaker promoters (see e.g., Chakrabarti et al. (1997) BioTechniques 23(6):1094-1097). Combinations of different promoters can be used to express different gene products in the same virus or two different viruses.

[0311] Expression of heterologous genes can be controlled by a constitutive promoter, or by an inducible promoter. For example, gene expression can be made inducible using a tetracycline-regulated promoter, whereby transcription is reversibly turned on or off in the presence of tetracycline or one of its derivative (e.g. doxycycline). In such a system, in the absence of an inducer, a tetracycline repressor (TetR) binds to the tet operator (tetO) to repress the activity of the promoter placed near the operator. In the presence of an inducer that binds to TetR, a conformational change occurs that prevents TetR from remaining bound to the operator, thereby permitting gene transcription.

[0312] In other examples, organ or tissue-specific expression can be controlled by regulatory sequences. In order to achieve expression only in the target organ, for example, a tumor to be treated, the foreign nucleotide sequence can be linked to a tissue specific promoter and used for gene therapy. Such promoters are well known to those skilled in the art (see, e.g., Zimmermann et al., Neuron 12: 11-24 (1994); Vidal et al., EMBO J. 9: 833-840 (1990); Mayford et al., Cell 81: 891-904 (1995); and Pinkert et al., Genes & Dev. 1: 268-76 (1987)).

[0313] As is known in the art, regulatory sequences can permit constitutive expression of the exogenous gene or can permit inducible expression of the exogenous gene. Further, the regulatory sequence can permit control of the level of expression of the exogenous gene. In some examples, such as gene product manufacture and harvesting, the regulatory sequence can result in constitutive, high levels of gene expression. In some examples, such as anti-(gene product) antibody harvesting, the regulatory sequence can result in constitutive, lower levels of gene expression. In tumor therapy examples, a therapeutic protein can be under the control of an internally inducible promoter or an externally inducible promoter.

[0314] Hence, expression of heterologous genes can be controlled by a constitutive promoter or by an inducible promoter. Inducible promoters can be used to provide tissue specific expression of the heterologous gene or can be inducible by the addition of a regulatory molecule to provide temporal specific induction of the promoter. In some examples, inducible expression can be under the control of cellular or other factors present in a tumor cell or present in a virus-infected tumor cell. In further examples, inducible expression can be under the control of an administrable substance, including IPTG, RU486 or other known induction compounds. Additional regulatory sequences can be used to control the expression of the one or more heterologous genes inserted the virus. Any of a variety of regulatory sequences are available to one skilled in the art according to known factors and design preferences.

[0315] c. Methods for Generating Modified Viruses

[0316] The viruses for use in the methods provided herein can be modified by insertion, deletion, replacement or mutation as described herein, for example insertion or replacement of heterologous nucleic acid, using standard methodologies well known in the art for modifying viruses. Methods for modification include, for example, in vitro recombination techniques, synthetic methods, direct cloning, and in vivo recombination methods as described, for example, in Sambrook et al., Molecular Cloning: A Laboratory Manual, 2nd edition, Cold Spring Harbor Laboratory Press, cold Spring Harbor N.Y. (1989), and in the Examples disclosed herein.

[0317] For example, generation of recombinant viruses, including recombinant vaccinia virus, is well known in the art, and typically involves the generation of gene cassettes or transfer vectors using standard techniques in molecular biology (see, e.g., U.S. Pat. No. 7,588,767 and US2009-0053244-A1, which describe exemplary methods of generating recombinant LIVP vaccinia viruses). Such techniques include various nucleic acid manipulation techniques, nucleic acid transfer protocols, nucleic acid amplification protocols, and other molecular biology techniques known in the art.

[0318] For example, point mutations or small insertions or deletions can be introduced into a gene of interest through the use of oligonucleotide mediated site-directed mutagenesis. In another example, homologous recombination can be used to introduce a mutation in the nucleic acid sequence or insertion or deletion of a nucleic acid molecule into a target sequence of interest. In some examples, mutations, insertions or deletions of nucleic acid in a particular gene can be selected for using a positive or negative selection pressure. See, e.g., Current Techniques in Molecular Biology, (Ed. Ausubel, et al.).

[0319] Nucleic acid amplification protocols include, but are not limited to, the polymerase chain reaction (PCR), or amplification via viruses or organisms, such as, but not limited to, bacteria, yeast, insect or mammalian cells. Use of nucleic acid tools such as plasmids, vectors, promoters and other regulating sequences, are well known in the art for a large variety of viruses and cellular organisms.

[0320] Nucleic acid transfer protocols include calcium chloride transformation/transfection, electroporation, liposome mediated nucleic acid transfer, N-[1-(2,3-dioloyloxy)propyl]-N,N,N-trimethylammonium methylsulfate meditated transformation, and others. Further a large variety of nucleic acid tools are available from many different sources, including various commercial sources. One skilled in the art will be readily able to select the appropriate tools and methods for genetic modifications of any particular virus according to the knowledge in the art and design choice.

[0321] Hence, any of a variety of modifications can be readily accomplished using standard molecular biological methods known in the art. The modifications will typically be one or more truncations, deletions, mutations or insertions of the viral genome. In one example, the modification can be specifically directed to a particular sequence in the viral genome. The modifications can be directed to any of a variety of regions of the viral genome, including, but not limited to, a regulatory sequence, a gene-encoding sequence, an intergenic sequence, a sequence without a known role, or a non-essential region of the viral genome. Any of a variety of regions of viral genomes that are available for modification are readily known in the art for many viruses, including LIVP.

[0322] Heterologous nucleic acid molecules are typically inserted into the viral genome in an intergenic region or in a locus that encodes a nonessential viral gene product. Insertion of heterologous nucleic acid at such sites generally does not significantly affect viral infection or replication in the target tissue. Exemplary insertion sites are known in the art and include, but are not limited to, J2R (thymidine kinase (TK)), A56R (hemagglutinin (HA)), F14.5L, vaccinia growth factor (VGF), A35R, N1L, E2L/E3L, K1L/K2L, superoxide dismutase locus, 7.5K, C7-K1L (host range gene region), B13R+B14R (hemorrhagic region), A26L (A type inclusion body region (ATI)) or 14L (large subunit, ribonucleotide reductase) gene loci. Insertion sites for the viruses provided herein also include sites that correspond to intragenic regions described in other poxviruses such as Modified Vaccinia Ankara (MVA) virus (exemplary sites set forth in U.S. Pat. No. 7,550,147), NYVAC (exemplary sites set forth in U.S. Pat. No. 5,762,938).

[0323] Methods for the generation of recombinant viruses using recombinant DNA techniques are well known in the art (e.g., see U.S. Pat. Nos. 4,769,330; 4,603,112; 4,722,848; 4,215,051; 5,110,587; 5,174,993; 5,922,576; 6,319,703; 5,719,054; 6,429,001; 6,589,531; 6,573,090; 6,800,288; 7,045,313; He et al. (1998) PNAS 95(5): 2509-2514; Racaniello et al., (1981) Science 214: 916-919; and Hruby et al., (1990) Clin Micro Rev. 3:153-170). Methods for the generation of recombinant vaccinia viruses are well known in the art (e.g., see Hruby et al., (1990) Clin Micro Rev. 3:153-170, U.S. Pat. Pub. No. 2005-0031643, now U.S. Pat. Nos. 7,588,767, 7,588,771, 7,662,398 and U.S. Pat. No. 7,045,313).

[0324] For example, generating a recombinant vaccinia virus that expresses a heterologous gene product typically includes the use of a recombination plasmid which contains the heterologous nucleic acid, optionally operably linked to a promoter, with vaccinia virus DNA sequences flanking the heterologous nucleic acid to facilitate homologous recombination and insertion of the gene into the viral genome. Generally, the viral DNA flanking the heterologous gene is complementary to a non-essential segment of vaccinia virus DNA, such that the gene is inserted into a nonessential location. The recombination plasmid can be grown in and purified from Escherichia coli and introduced into suitable host cells, such as, for example, but not limited to, CV-1, BSC-40, BSC-1 and TK-143 cells. The transfected cells are then superinfected with vaccinia virus which initiates a replication cycle. The heterologous DNA can be incorporated into the vaccinia viral genome through homologous recombination, and packaged into infection progeny. The recombinant viruses can be identified by methods known in the art, such as by detection of the expression of the heterologous gene product, or by using positive or negative selection methods (U.S. Pat. No. 7,045,313).

[0325] In another example, the recombinant vaccinia virus that expresses a heterologous gene product can be generated by direct cloning (see, e.g. U.S. Pat. No. 6,265,183 and Scheiflinger et al. (1992) Proc. Natl. Acad. Sci. USA 89: 9977-9981). In such methods, the heterologous nucleic acid, optionally operably linked to a promoter, is flanked by restriction endonuclease cleavage sites for insertion into a unique restriction endonuclease site in the target virus. The virus DNA is purified using standard techniques and is cleaved with the sequence-specific restriction endonuclease, where the sequence is a unique site in the virus genome. Any unique site in the virus genome can be employed provided that modification at the site does not interfere with viral replication. For example, in vaccinia virus strain LIVP, the NotI restriction site is located in the ORF encoding the F14.5L gene with unknown function (Mikryukov et al., Biotekhnologiya 4: 442-449 (1988)). Table 7 provides a summary of unique restriction sites contained in exemplary LIVP strains and designates the nucleotide position of each. Such LIVP strains can be modified herein by direct cloning and insertion of heterologous DNA into the site or sites. Generally, insertion is in a site that is located in a non-essential region of the virus genome. For example, exemplary modifications herein include insertion of a foreign DNA sequence into the NotI digested virus DNA.

TABLE 7
Unique restriction endonuclease cleavage sites in LIVP clonal
isolates

| Restriction | | | | | | | | | |
|---|---|---|---|---|---|---|---|---|---|
| Enzyme/Site | | | | | | | | | LIVP |
| | SEQ | 1.1.1 | 2.1.1 | 4.1.1 | 5.1.1 | 6.1.1 | 7.1.1 | 8.1.1 | Parental |
| Name/ | ID | (SEQ ID | (SEQ ID | (SEQ ID | (SEQ ID | (SEQ ID | (SEQ ID | (SEQ ID | (SEQ ID |
| sequence | NO | NO: 3) | NO: 4) | NO: 5) | NO: 6) | NO: 7) | NO: 8) | NO: 9) | NO: 20) |
| SbfI | 64 | 40033/ | 40756/ | 39977/ | 40576/ | 40177/ | 40213/ | 40493/ | 38630/ |
| CCTGCAGG | | 40029 | 40752 | 39973 | 40572 | 40173 | 40209 | 40489 | 38626 |
| NotI | 65 | 42989/ | 43712/ | 42933/ | 43532/ | 43133/ | 43169/ | 43449/ | 41586/ |
| GCGGCCGC | | 42998 | 43716 | 42937 | 43536 | 43137 | 43173 | 43453 | 41590 |
| SgrAI | 66 | 114365/ | 115107/ | 114308/ | 114924/ | 114489/ | 114548/ | 114845/ | 112975/ |
| CRCCGGYG | | 114369 | 115111 | 114312 | 114928 | 114493 | 114552 | 114849 | 112979 |
| SmaI | 67 | 159260 | NA | NA | NA | NA | NA | NA | NA |
| CCCGGG | | | | | | | | | |
| TspMI | 68 | 159258/ | NA | NA | NA | NA | NA | NA | NA |
| CCCGGG | | 159262 | | | | | | | |
| XmaI | 69 | 159258/ | NA | NA | NA | NA | NA | NA | NA |
| CCCGGG | | 159262 | | | | | | | |
| ApaI | 70 | 180516/ | NA | 180377/ | 181027/ | 180638/ | 180596/ | 180972/ | NA |
| CCCGGG | | 180512 | | 180373 | 181023 | 180634 | 180592 | 180968 | |
| PspOMI | 71 | 180512/ | NA | 180373/ | 181023/ | 180634/ | 180592/ | 180968/ | NA |
| CCCGGG | | 180516 | | 180377 | 181027 | 180638 | 180596 | 180972 | |

[0326] In some examples, the virus genomic DNA is first modified by homologous recombination to introduce one or more unique restriction sites in the virus (see, e.g. Mackett et al. (1984) J. Virol. 857-864). Following cleavage with the restriction endonuclease, the cleaved DNA is optionally treated with a phosphatase to remove a phosphate moiety from an end of the DNA segment that is produced by cleavage with the endonuclease. Typically, a plasmid vector is generated that contains the heterologous DNA for insertion flanked by the restriction sites. Prior to insertion into the virus, the heterologous DNA is excised from the plasmid by cleavage with the sequence specific restriction endonuclease. The heterologous DNA is then ligated to the cleaved viral DNA and is packaged in a permissive cell line by infection of the cells with a helper virus, such as, but not limited to a fowlpox virus or a PUV-inactivated helper vaccinia virus, and transfection of the ligated DNA into the infected cells.

[0327] In some examples, the methods involve homologous recombination and/or use of unique restriction sites in the virus. For example, a recombinant LIVP vaccinia virus with an insertion, for example, in the F14.5L gene (e.g., in the Not I restriction site of an LIVP isolate) can be prepared by the following steps: (a) generating (i) a vaccinia shuttle/transfer plasmid containing the modification (e.g. a gene expression cassette or a modified F14.5L gene) inserted at a restriction site, X (e.g. Not 1), where the restriction site in the vector is flanked by parental virus sequences of the target insertion site and (ii) an LIVP virus DNA digested at restriction site X (e.g. Not I) and optionally dephosphorylated; (b) infecting cells with PUV-inactivated helper vaccinia virus and transfecting the infected host cells with a mixture of the constructs of (i) and (ii) of step a; and (c) isolating the recombinant vaccinia viruses from the transfectants. One skilled in the art knows how to perform such methods (see, e.g., Timiryasova et al. (Biotechniques 31: 534-540 (2001)). Typically, the restriction site X is a unique restriction site in the virus as described above.

[0328] In one example, the methods include introducing into the viruses one or more genetic modifications, followed by screening the viruses for properties reflective of the modification or for other desired properties. In some examples, the modification can be fully or partially random, whereupon selection of any particular modified virus can be determined according to the desired properties of the modified the virus.

[0329] 4. Methods of Producing Viruses

[0330] Viruses for use in the methods provided herein can be produced by methods known to one of skill in the art. Typically, the virus is propagated in host cells, quantified and prepared for storage before finally being prepared in the compositions described herein. The virus can be propagated in suitable host cells to enlarge the stock, the concentration of which is then determined. In some examples, the infectious titer is determined, such as by plaque assay. The total number of viral particles also can be determined. The viruses are stored in conditions that promote stability and integrity of the virus, such that loss of infectivity over time is minimized. In some examples, a large amount of virus is produced and stored in small aliquots of known concentration that can be used for multiple procedures over an extended period of time. Conditions that are most suitable for various viruses will differ, and are known in the art, but typically include freezing or drying, such as by lyophilization. The viruses can be stored at a concentration of 10⁵-10¹⁰ pfu/mL, for example, 10⁷-10⁹ pfu/mL, such as at least or about or is 10⁶ pfu/mL, 10⁷ pfu/mL, 10⁸ pfu/mL or 10⁹ pfu/mL. Immediately prior to preparing compositions provided herein, the stored viruses can be reconstituted (if dried for storage) and diluted in an appropriate medium or solution. The following sections provide exemplary methods that can be used for the production and preparation of viruses for use in preparing viruses in the compositions provided herein.

[0331] a. Host Cells for Propagation

[0332] Virus strains can be propagated in an appropriate host cell. Such cells can be a group of a single type of cells or a mixture of different types of cells. Host cells can include cultured cell lines, primary cells, and proliferative cells. These host cells can include any of a variety of animal cells, such as mammalian, avian and insect cells and tissues that are susceptible to the virus, such as vaccinia virus, infection, including chicken embryo, rabbit, hamster, and monkey kidney cells. Suitable host cells include, but are not limited to, hematopoietic cells (totipotent, stem cells, leukocytes, lymphocytes, monocytes, macrophages, APC, dendritic cells, non-human cells and the like), pulmonary cells, tracheal cells, hepatic cells, epithelial cells, endothelial cells, muscle cells (e.g., skeletal muscle, cardiac muscle or smooth muscle), fibroblasts, and cell lines including, for example, CV-1, BSC40, Vero, and BSC-1, and human HeLa cells. Typically, viruses are propagated in cell lines that that can be grown at monolayers or in suspension. For example, exemplary cell lines for the propagation of vaccinia viruses include, but are not limited to, CV-1, BSC40, Vero, BGM, BSC-1 and RK-13 cells. Purification of the cultured strain from the system can be effected using standard methods.

[0333] b. Concentration Determination

[0334] The concentration of virus in a solution, or virus titer, can be determined by a variety of methods known in the art. In some methods, a determination of the number of infectious virus particles is made (typically termed plaque forming units (PFU)), while in other methods, a determination of the total number of viral particles, either infectious or not, is made. Methods that calculate the number of infectious virions include, but are not limited to, the plaque assay, in which titrations of the virus are grown on cell monolayers and the number of plaques is counted after several days to several weeks, and the endpoint dilution method, which determines the titer within a certain range, such as one log. Methods that determine the total number of viral particles, including infectious and non-infectious, include, but are not limited to, immunohistochemical staining methods that utilize antibodies that recognize a viral antigen and which can be visualized by microscopy or FACS analysis; optical absorbance, such as at 260 nm; and measurement of viral nucleic acid, such as by PCR, RT-PCR, or quantitation by labeling with a fluorescent dye.

[0335] c. Storage Methods

[0336] Once the virus has been purified (or to a desired purity) and the titer has been determined, the virus can be stored in conditions which optimally maintain its infectious integrity. Typically, viruses are stored in the dark, because light serves to inactivate the viruses over time. Viral stability in storage is usually dependent upon temperatures. Although some viruses are thermostable, most viruses are not stable for more than a day at room temperature, exhibiting reduced viability (Newman et al., (2003) J. Inf. Dis. 187:1319-1322). Vaccinia virus is generally stable at refrigerated temperatures, and can be stored in solution at 4° C., frozen at, for example −20° C., −70° C. or −80° C., or lyophilized with little loss of viability (Newman et al., (2003) J. Inf. Dis. 187:1319-1322, Hruby et al., (1990) Clin. Microb. Rev. 3:153-170). Methods and conditions suitable for the storage of particular viruses are known in the art, and can be used to store the viruses used in the methods presented herein.

[0337] For short-term storage of viruses, for example, 1 day, 2 days, 4 days or 7 days, temperatures of approximately 4° C. are generally recommended. For long-term storage, most viruses can be kept at −20° C., −70° C. or −80° C. When frozen in a simple solution such as PBS or Tris solution (20 mM Tris pH 8.0, 200 NaCl, 2-3% glycerol or sucrose) at these temperatures, the virus can be stable for 6 months to a year, or even longer. Repeated freeze-thaw cycles are generally avoided, however, since it can cause a decrease in viral titer. The virus also can be frozen in media containing other supplements in the storage solution which can further preserve the integrity of the virus. For example, the addition of serum or bovine serum albumin (BSA) to a viral solution stored at −80° C. can help retain virus viability for longer periods of time and through several freeze-thaw cycles.

[0338] In other examples, the virus sample is dried for long-term storage at ambient temperatures. Viruses can be dried using various techniques including, but not limited to, freeze-drying, foam-drying, spray-drying and desiccation. Water is a reactant in nearly all of the destructive pathways that degrade viruses in storage. Further, water acts as a plasticizer, which allows unfolding and aggregation of proteins. Since water is a participant in almost all degradation pathways, reduction of the aqueous solution of viruses to a dry powder provides an alternative composition methodology to enhance the stability of such samples. Lyophilization, or freeze-drying, is a drying technique used for storing viruses (see, e.g., Croyle et al., (1998) Pharm. Dev. Technol., 3(3), 973-383). There are three stages to freeze-drying; freezing, primary drying and secondary drying. During these stages, the material is rapidly frozen and dehydrated under high vacuum. Once lyophilized, the dried virus can be stored for long periods of time at ambient temperatures, and reconstituted with an aqueous solution when needed. Various stabilizers can be included in the solution prior to freeze-drying to enhance the preservation of the virus. For example, it is known that high molecular weight structural additives, such as serum, serum albumin or gelatin, aid in preventing viral aggregation during freezing, and provide structural and nutritional support in the lyophilized or dried state. Amino acids such as arginine and glutamate, sugars, such as trehalose, and alcohols such as mannitol, sorbitol and inositol, can enhance the preservation of viral infectivity during lyophilization and in the lyophilized state. When added to the viral solution prior to lyophilization, urea and ascorbic acid can stabilize the hydration state and maintain osmotic balance during the dehydration period. Typically, a relatively constant pH of about 7.0 is maintained throughout lyophilization.

[0339] Other methods for the storage of viruses at ambient, refrigerated or freezing temperatures are known in the art, and include, but are not limited to, those described in U.S. Pat. Nos. 5,149,653; 6,165,779; 6,255,289; 6,664,099; 6,872,357; and 7,091,030; and in U.S. Pat. Pub. Nos. 2003-0153065, 2004-0038410 and 2005-0032044.

[0340] d. Preparation of Virus

[0341] Immediately prior to use, the virus can be prepared at an appropriate concentration in suitable media, and can be maintained at a cool temperature, such as on ice, until use. If the virus was lyophilized or otherwise dried for storage, then it can be reconstituted in an appropriate aqueous solution. The aqueous solution in which the virus is prepared is typically the medium used in the assay (e.g., DMEM or RPMI) or one that is compatible, such as a buffered saline solution (e.g., PBS, TBS, Hepes solution). For pharmaceutical applications, the virus can be immediately prepared or reconstituted in a pharmaceutical solution. Numerous pharmaceutically acceptable solutions for use are well known in the art (see e.g. Remington's Pharmaceutical Sciences (18^{th} edition) ed. A. Gennaro, 1990, Mack Publishing Co., Easton, Pa.). In one example, the viruses can be diluted in a physiologically acceptable solution, such as sterile saline or sterile buffered saline, with or without an adjuvant or carrier. In other examples, the pharmaceutical solution can contain a component that provides viscosity (e.g. glycerol) and/or component that has bactericidal properties (e.g. phenol). The virus can be reconstituted or diluted to provide the desired concentration or amount. The particular concentration can be empirically determined by one of skill in the art depending on the particular application.

### E. METHODS OF TREATMENT WITH ANTIBIOTICS FOR INCREASING THE THERAPEUTIC EFFICACY OF VIRAL THERAPY

[0342] Provided herein are methods for increasing the therapeutic efficacy of viral therapy by administering antibiotics. The methods involve administering a viral therapy and an antibiotic that is effective against commensal gut bacteria. The viral therapy can be oncolytic viral therapy, e.g., the administration of an oncolytic virus, or can be gene therapy whereby a virus is administered to provide heterologous nucleic acid to a subject. Administration of the antibiotic with the viral therapy increases the therapeutic efficacy of the viral therapy. For example, treatment with an antibiotic and an oncolytic virus results in prolonged viral efficacy as compared to administration of an oncolytic virus alone. Exemplary antibiotics and viruses for use in the methods provided are described in sections C and D, respectively, above. Exemplary therapeutic uses of viruses, including oncolytic viruses, are described in section E.1. below.

[0343] In some examples, the methods provided herein for increasing the therapeutic efficacy of viral therapy can be used to treat cancer or tumors. Such methods involve administering an oncolytic virus effective against cancer or tumors and an antibiotic that is effective against commensal gut bacterial. Administration of the antibiotic with the oncolytic virus weakens the immune response at the time of viral infection thereby improving the efficacy of the oncolytic virus therapy for treating the cancer or tumor. The methods provided herein can be used for the treatment of cancers and tumors, such as, but not limited to, acute lymphoblastic leukemia, acute lymphoblastic leukemia, acute myeloid leukemia, acute promyelocytic leukemia, adenocarcinoma, adenoma, adrenal cancer, adrenocortical carcinoma, AIDS-related cancer, AIDS-related lymphoma, anal cancer, appendix cancer, astrocytoma, basal cell carcinoma, bile duct cancer, bladder cancer, bone cancer, osteosarcoma/malignant fibrous histiocytoma, brainstem glioma, brain cancer, carcinoma, cerebellar astrocytoma, cerebral astrocytoma/malignant glioma, ependymoma, medulloblastoma, supratentorial primitive neuroectodermal tumor, visual pathway or hypothalamic glioma, breast cancer, bronchial adenoma/carcinoid, Burkitt lymphoma, carcinoid tumor, carcinoma, central nervous system lymphoma, cervical cancer, chronic lymphocytic leukemia, chronic myelogenous leukemia, chronic myeloproliferative disorder, colon cancer, cutaneous T-cell lymphoma, desmoplastic small round cell tumor, endometrial cancer, ependymoma, epidermoid carcinoma, esophageal cancer, Ewing's sarcoma, extracranial germ cell tumor, extragonadal germ cell tumor, extrahepatic bile duct cancer, eye cancer/intraocular melanoma, eye cancer/retinoblastoma, gallbladder cancer, gallstone tumor, gastric/stomach cancer, gastrointestinal carcinoid tumor, gastrointestinal stromal tumor, giant cell tumor, glioblastoma multiforme, glioma, hairy-cell tumor, head and neck cancer, heart cancer, hepatocellular/liver cancer, Hodgkin lymphoma, hyperplasia, hyperplastic corneal nerve tumor, in situ carcinoma, hypopharyngeal cancer, intestinal ganglioneuroma, islet cell tumor, Kaposi's sarcoma, kidney/renal cell cancer, laryngeal cancer, leiomyoma tumor, lip and oral cavity cancer, liposarcoma, liver cancer, non-small cell lung cancer, small cell lung cancer, lymphomas, macroglobulinemia, malignant carcinoid, malignant fibrous histiocytoma of bone, malignant hypercalcemia, malignant melanomas, marfanoid habitus tumor, medullary carcinoma, melanoma, merkel cell carcinoma, mesothelioma, metastatic skin carcinoma, metastatic squamous neck cancer, mouth cancer, mucosal neuromas, multiple myeloma, mycosis fungoides, myelodysplastic syndrome, myeloma, myeloproliferative disorder, nasal cavity and paranasal sinus cancer, nasopharyngeal carcinoma, neck cancer, neural tissue cancer, neuroblastoma, oral cancer, oropharyngeal cancer, osteosarcoma, ovarian cancer, ovarian epithelial tumor, ovarian germ cell tumor, pancreatic cancer, parathyroid cancer, penile cancer, pharyngeal cancer, pheochromocytoma, pineal astrocytoma, pineal germinoma, pineoblastoma, pituitary adenoma, pleuropulmonary blastoma, polycythemia vera, primary brain tumor, prostate cancer, rectal cancer, renal cell tumor, reticulum cell sarcoma, retinoblastoma, rhabdomyosarcoma, salivary gland cancer, seminoma, Sezary syndrome, skin cancer, small intestine cancer, soft tissue sarcoma, squamous cell carcinoma, squamous neck carcinoma, stomach cancer, supratentorial primitive neuroectodermal tumor, testicular cancer, throat cancer, thymoma, thyroid cancer, topical skin lesion, trophoblastic tumor, urethral cancer, uterine/endometrial cancer, uterine sarcoma, vaginal cancer, vulvar cancer, Waldenstrom's macroglobulinemia and Wilm's tumor.

[0344] In some examples of the methods provided herein, the methods further include the step of administering one or more additional anti-cancer therapies. Exemplary anti-cancer therapies that can be administered for cancer therapy in the methods provided include, but are not limited to, chemotherapeutic compounds (e.g., toxins, alkylating agents, nitrosoureas, anticancer antibiotics, antimetabolites, antimitotics, topoisomerase inhibitors), cytokines, growth factors, hormones, photosensitizing agents, radionuclides, signaling modulators, anticancer antibodies, anticancer oligopeptides, anticancer oligonucleotides (e.g., antisense RNA and siRNA), angiogenesis inhibitors, radiation therapy, or a combination thereof. Exemplary chemotherapeutic compounds include, but are not limited to, Ara-C, cisplatin, carboplatin, paclitaxel, doxorubicin, gemcitabine, camptothecin, irinotecan, cyclophosphamide, 6-mercaptopurine, vincristine, 5-fluorouracil, and methotrexate. Anticancer agents include anti-metastatic agents. In some examples, the anti-cancer agent is an oncolytic virus, such as an LIVP vaccinia virus.

[0345] In some examples, the virus is administered at a therapeutic dosage, for example, at a dosage of between at or about 1×10⁶ pfu to at or about 1×10¹⁴ pfu, such as at least, or about or at 1×10⁶ pfu, 1×10⁷ pfu or 1×10⁸ pfu, 1×10⁹ pfu, 1×10¹⁰ pfu, 1×10¹¹ pfu, 1×10¹² pfu, 1×10¹³ pfu, or 1×10¹⁴ pfu.

[0346] In the provided methods, the antibiotic can be administered prior to, at the same time as, after, during, or intermittently with administration of the virus to the subject. In some examples of the methods, the antibiotic is administered prior to administration of the virus to the subject. For example, the antibiotic is administered at least, at about or at 1, 2, 3, 4, 5, 6, 7, 8, 9, 10, 11, 12, 13, 14, 15, 16, 17, 18, 19, 20, 21, 22, 23, 24, 36 or 48 or more hours prior to administration of the virus to the subject. In other examples of the methods, the antibiotic is administered concurrent with, or at the same time as, administration of the virus to the subject. In yet other examples of the methods, the antibiotic is administered after administration of the virus to the subject. For example, the antibiotic is administered at least, at about or at ¼, ½, 1, 2, 3, 4, 5, 6, 7, 8, 9, 10, 11, 12, 13, 14, 15, 16, 17, 18, 19, 20, 21, 22, 23, 24 or more hours, 2, 3, 4, 5, 6, 7, 8, 9, 10, 11, 12, 13, 14 or more days after administration of the virus to the subject. The antibiotic can be administered once, or can be administered several times over the cycle of administration of the virus. For example, the antibiotic can be administered 1, 2, 3, 4, 5, 6, 7, 8, 9, 10 or more times over the cycle of administration of the virus.

[0347] The methods provided herein for use in treating cancers or tumors can be used in combination with one or more additional methods for detecting or monitoring a cancer or tumor or monitoring an anti-cancer therapy. For example, a tumor or metastasis can be detected by physical examination of subject, laboratory tests, such as blood or urine tests, imaging and genetic testing, such as testing for gene mutations that are known to cause cancer. A tumor or metastasis can be detected using in vivo imaging techniques, such as digital X-ray radiography, mammography, CT (computerized tomography) scanning, MRI (magnetic resonance imaging), ultrasonography and PET (positron emission tomography) scanning. Alternatively, a tumor can be detected using tumor markers in blood, serum or urine, that is, by monitoring substances produced by tumor cells or by other cells in the body in response to cancer. For example, prostate specific antigen (PSA) levels are used to detect prostate cancer in men. Additionally, tumors can be detected and monitored by biopsy.

[0348] Any of a variety of monitoring steps can be used to monitor an anti-cancer therapy, including, but not limited to, monitoring tumor size, monitoring anti-(tumor antigen) antibody titer, monitoring anti-virus antibody titer, monitoring the presence and/or size of metastases, monitoring the subject's lymph nodes, monitoring the subject's weight or other health indicators including blood or urine markers, monitoring expression of a detectable gene product, and monitoring titer of the oncolytic reporter virus, in a tumor, tissue or organ of a subject.

[0349] 1. Therapeutic Methods

[0350] The viruses provided herein, including the clonal virus strains, for example, can be used for the treatment of proliferative disorders or conditions, including the treatment (such as inhibition) of cancerous cells, neoplasms, tumors, metastases, cancer stem cells, and other immunoprivileged cells or tissues, such as wounded or inflamed tissues. The viruses provided herein preferentially accumulate in tumors or metastases. In some examples, the administration of a virus provided herein results in a slowing of tumor growth. In other examples, the administration of a virus provided herein results in a decrease in tumor volume, including elimination or eradication of the tumor. The therapeutic methods and uses provided herein, however, do not require the administered virus to kill tumor cells or decrease the tumor size. Instead, the methods provided herein include administering to a subject a virus provided herein that can cause or enhance an anti-tumor immune response in the subject. In some examples, the viruses provided herein can be administered to a subject without causing viral-induced disease in the subject. In some examples, the viruses can elicit an anti-tumor immune response in the subject, where typically the viral-mediated anti-tumor immune response can develop, for example, over several days, a week or more, 10 days or more, two weeks or more, or a month or more. In some exemplary methods, the virus can be present in the tumor, and can cause an anti-tumor immune response without the virus itself causing enough tumor cell death to prevent tumor growth. In some examples, the tumor is a monotherapeutic tumor or monotherapeutic cancer, where the tumor or cancer does not decrease in volume when treated with the virus or a therapeutic agent alone.

[0351] In some examples, the therapeutic methods provided herein inhibit tumor growth in a subject, where the methods include administering to a subject a virus that can accumulate in a tumor and/or metastasis, and can cause or enhance an anti-tumor immune response. The anti-tumor immune response induced as a result of tumor or metastases-accumulated viruses can result in inhibition of tumor growth.

[0352] In some examples, the therapeutic methods provided herein inhibit growth or formation of a metastasis in a subject, where the methods include administering to a subject a virus provided herein that can accumulate in a tumor and/or metastasis, and can cause or enhance an anti-tumor immune response. The anti-tumor immune response induced as a result of tumor or metastasis-accumulated viruses can result in inhibition of metastasis growth or formation.

[0353] In other examples, the therapeutic methods provided herein decrease the size of a tumor and/or metastasis in a subject, where the methods include administering to a subject a virus provided herein that can accumulate in a tumor and/or metastasis, and can cause or enhance an anti-tumor immune response. The anti-tumor immune response induced as a result of tumor or metastasis-accumulated viruses can result in a decrease in the size of the tumor and/or metastasis.

[0354] In some examples, the therapeutic methods provided herein eliminate a tumor and/or metastasis from a subject, where the methods include administering to a subject a virus provided herein that can accumulate in a tumor and/or metastasis, and can cause or enhance an anti-tumor immune response. The anti-tumor immune response induced as a result of tumor or metastasis-accumulated viruses can result in elimination of the tumor and/or metastasis from the subject.

[0355] Methods of reducing or inhibiting tumor growth, inhibiting metastasis growth and/or formation, decreasing the size of a tumor or metastasis, eliminating a tumor or metastasis and/or cancer stem cell or other tumor therapeutic methods provided herein include causing or enhancing an anti-tumor immune response in the host. The immune response of the host, being anti-tumor in nature, can be mounted against tumors and/or metastases in which viruses have accumulated, and can also be mounted against tumors and/or metastases in which viruses have not accumulated, including tumors and/or metastases that form after administration of the virus to the subject. Accordingly, a tumor and/or metastasis whose growth or formation is inhibited, or whose size is decreased, or that is eliminated, can be a tumor and/or metastasis in which the viruses have accumulated, or also can be a tumor and/or metastasis in which the viruses have not accumulated. Accordingly, provided herein are methods of reducing or inhibiting tumor growth, inhibiting metastasis growth and/or formation, decreasing the size of a tumor or metastasis, eliminating a tumor or metastasis, or other tumor therapeutic methods, where the method includes administering to a subject a virus provided herein, where the virus accumulates in at least one tumor or metastasis and causes or enhances an anti-tumor immune response in the subject, and the immune response also is mounted against a tumor and/or metastasis in which the virus cell did not accumulate. In another example, methods are provided for inhibiting or preventing recurrence of a neoplastic disease or inhibiting or preventing new tumor growth, where the methods include administering to a subject a virus provided herein that can accumulate in a tumor and/or metastasis, and can cause or enhance an anti-tumor immune response, and the anti-tumor immune response can inhibit or prevent recurrence of a neoplastic disease or inhibit or prevent new tumor growth.

[0356] The tumor or neoplastic disease therapeutic methods provided herein, such as methods of reducing or inhibiting tumor growth, inhibiting metastasis growth and/or formation, decreasing the size of a tumor or metastasis, eliminating a tumor or metastasis, or other tumor therapeutic methods, also can include administering to a subject a virus provided herein that can cause tumor cell lysis or tumor cell death. Such a virus can be the same virus as the virus that can cause or enhance an anti-tumor immune response in the subject. Viruses, such as the viruses provided herein, can cause cell lysis or tumor cell death as a result of expression of an endogenous gene or as a result of an exogenous gene. Endogenous or exogenous genes can cause tumor cell lysis or inhibit cell growth as a result of direct or indirect actions, as is known in the art, including lytic channel formation or activation of an apoptotic pathway. Gene products, such as exogenous gene products can function to activate a prodrug to an active, cytotoxic form, resulting in cell death where such genes are expressed.

[0357] Such methods of tumor and/or metastasis treatment can include administration of a virus provided herein for therapy, such as for gene therapy, for cancer gene therapy, or for vaccine therapy. Such a virus can be used to stimulate humoral and/or cellular immune response, induce strong cytotoxic T lymphocytes responses in subjects who can benefit from such responses. For example, the virus can provide prophylactic and therapeutic effects against a tumor infected by the virus or other infectious diseases, by rejection of cells from tumors or lesions using viruses that express immunoreactive antigens (Earl et al., Science 234:728-831 (1986); Lathe et al., Nature (London) 32:878-880 (1987)), cellular tumor-associated antigens (Bernards et al., Proc. Natl. Acad. Sci. USA 84:6854-6858 (1987); Estin et al., Proc. Natl. Acad. Sci. USA 85:1052-1056 (1988); Kantor et al., J. Natl. Cancer Inst. 84: 1084-1091 (1992); Roth et al., Proc. Natl. Acad. Sci. USA 93:4781-4786 (1996)) and/or cytokines (e.g., IL-2, IL-12), costimulatory molecules (B7-1, B7-2) (Rao et al., J. Immunol. 156: 3357-3365 (1996); Chamberlain et al., Cancer Res. 56: 2832-2836 (1996); Oertli et al., J. Gen. Virol. 77: 3121-3125 (1996); Qin and Chatterjee, Human Gene Ther. 7: 1853-1860 (1996); McAneny et al., Ann. Surg. Oncol. 3: 495-500 (1996)), or other therapeutic proteins.

[0358] As shown previously, solid tumors can be treated with viruses, such as vaccinia viruses, resulting in an enormous tumor-specific virus replication, which can lead to tumor protein antigen and viral protein production in the tumors (U.S. Patent Publication No. 2005-0031643, now U.S. Pat. Nos. 7,588,767, 7,588,771, 7,662,398), which provide and exemplify the GLV-1h68 virus and derivatives thereof. Vaccinia virus administration to mice resulted in lysis of the infected tumor cells and a resultant release of tumor-cell-specific antigens. Continuous leakage of these antigens into the body led to a very high level of antibody titer (in approximately 7-14 days) against tumor proteins, viral proteins, and the virus encoded engineered proteins in the mice. The newly synthesized anti-tumor antibodies and the enhanced macrophage, neutrophils count were continuously delivered via the vasculature to the tumor and thereby provided for the recruitment of an activated immune system against the tumor. The activated immune system then eliminated the foreign compounds of the tumor including the viral particles. This interconnected release of foreign antigens boosted antibody production and continuous response of the antibodies against the tumor proteins to function like an autoimmunizing vaccination system initiated by vaccinia viral infection and replication, followed by cell lysis, protein leakage and enhanced antibody production. Thus, the viruses provided herein and the viruses generated using the methods provided herein can be administered in a complete process that can be applied to all tumor systems with immunoprivileged tumor sites as site of privileged viral growth, which can lead to tumor elimination by the host's own immune system.

[0359] In one example, the tumor treated is a cancer such as pancreatic cancer, non-small cell lung cancer, multiple myeloma or leukemia, although the cancer is not limited in this respect, and other metastatic diseases can be treated by the combinations provided herein. For example, the tumor treated can be a solid tumor, such as of the lung and bronchus, breast, colon and rectum, kidney, stomach, esophagus, liver and intrahepatic bile duct, urinary bladder, brain and other nervous system, head and neck, oral cavity and pharynx, cervix, uterine corpus, thyroid, ovary, testes, prostate, malignant melanoma, cholangiocarcinoma, thymoma, non-melanoma skin cancers, as well as hematologic tumors and/or malignancies, such as childhood leukemia and lymphomas, multiple myeloma, Hodgkin's disease, lymphomas of lymphocytic and cutaneous origin, acute and chronic leukemia such as acute lymphoblastic, acute myelocytic or chronic myelocytic leukemia, plasma cell neoplasm, lymphoid neoplasm and cancers associated with AIDS. Exemplary tumors include, for example, pancreatic tumors, ovarian tumors, lung tumors, colon tumors, prostate tumors, cervical tumors and breast tumors. In one example, the tumor is a carcinoma such as, for example, an ovarian tumor or a pancreatic tumor.

[0360] In other examples, methods are provided for immunizing a subject, where the methods include administering to the subject a virus that expresses one or more antigens against which antigens the subject will develop an immune response. The immunizing antigens can be endogenous to the virus, such as vaccinia antigens on a vaccinia virus used to immunize against smallpox, measles, mumps, or the immunizing antigens can be exogenous antigens expressed by the virus, such as influenza or HIV antigens expressed on a viral capsid surface. In the case of smallpox, for example, a tumor specific protein antigen can be carried by an attenuated vaccinia virus (encoded by the viral genome) for a smallpox vaccine. Thus, the viruses provided herein, including the modified vaccinia viruses can be used as vaccines.

[0361] In some examples, provided herein are methods for eliciting or enhancing antibody production against a selected antigen or a selected antigen type in a subject, where the methods include administering to a subject a virus that can accumulate in a tumor and/or metastasis, and can cause release of a selected antigen or selected antigen type from the tumor, resulting in antibody production against the selected antigen or selected antigen type. Any of a variety of antigens can be targeted in the methods provided herein, including a selected antigen such as an exogenous gene product expressed by the virus, or a selected antigen type such as one or more tumor antigens release from the tumor as a result of viral infection of the tumor (e.g., by lysis, apoptosis, secretion or other mechanism of causing antigen release from the tumor).

[0362] In some examples, it can be desirable to maintain release of the selected antigen or selected antigen type over a series of days, for example, at least a week, at least ten days, at least two weeks or at least a month. Provided herein are methods for providing a sustained antigen release within a subject, where the methods include administering to a subject a virus that can accumulate in a tumor and/or metastasis, and can cause sustained release of an antigen, resulting in antibody production against the antigen. The sustained release of antigen can result in an immune response by the viral-infected host, in which the host can develop antibodies against the antigen, and/or the host can mount an immune response against cells expressing the antigen, including an immune response against tumor cells. Thus, the sustained release of antigen can result in immunization against tumor cells. In some examples, the viral-mediated sustained antigen release-induced immune response against tumor cells can result in complete removal or killing of all tumor cells.

[0363] 2. Pharmaceutical Compositions, Combinations and Kits

[0364] Provided herein are pharmaceutical compositions, combinations and kits for practicing the methods provided herein. For example, provide herein are pharmaceutical compositions containing an antibiotic, a virus and a pharmaceutical carrier. Combinations can include, for example, an antibiotic and two or more viruses; an antibiotic, a virus and a detectable compound; an antibiotic, a virus and a therapeutic compound; an antibiotic, a virus and a viral expression modulating compound; or any combination thereof. Kits can include one or more pharmaceutical compositions or combinations provided herein, and one or more components, such as instructions for use, a device for administering the pharmaceutical composition or combination to a subject, a device for administering a therapeutic or diagnostic compound to a subject or a device for detecting a virus in a subject.

[0365] The pharmaceutical compositions, combinations, and kits provided herein can be used to increase the effectiveness of therapeutic viral therapy for the treatment of tumors, for example, by containing an antibiotic, such as an antibiotic that is not an anti-cancer antibiotic, that inhibits the growth of or kills commensal gut bacteria to thereby reduce the number of gut bacteria. Thus, the pharmaceutical compositions, combinations and kits typically contain therapeutically effective amounts of the virus and antibiotic. Therapeutically effective amounts for virus and antibiotic, provided in compositions, combinations, and kits, depend upon the virus and antibiotic in the composition and the subject to whom the composition is administered. Exemplary therapeutic effective amounts of virus and antibiotic are described above in the current section and in Section C, respectively.

[0366] An antibiotic and virus contained in a pharmaceutical composition, combination or kit can include any antibiotic or virus provided herein. The pharmaceutical compositions, combinations or kits can include one or more additional viruses that can be selected from a viruses provided herein, or other therapeutic or diagnostic virus, such as any oncolytic virus provided herein.

[0367] a. Pharmaceutical Compositions

[0368] Provided herein are pharmaceutical compositions containing an antibiotic, a virus and a suitable pharmaceutical carrier. The pharmaceutical compositions provided herein can be formulated for single dose or multiple dose administration. For example, pharmaceutical composition formulated for multiple dosage administration can be diluted to a desired dose for single dosage administration.

[0369] Exemplary therapeutically effective amounts of the composition depend upon the virus and antibiotic in the composition and the subject to whom the composition is administered. Exemplary therapeutic effective amounts of virus and antibiotic are described above in the current section and in Section C, respectively. Typically, single dosage amounts of the pharmaceutical compositions provided are between or about between at least 1 mg and at least 10 g, inclusive; or between or about between at least 1 mg and at least 1 gm, inclusive; or between or about at least 500 mg and at or about at least 5 g; or is or is at least about 1, 2, 3, 4, 5, 6, 7, 8, 9, 10, 15, 20, 25, 30, 35, 40, 45, 50, 55, 60, 65, 70, 75, 80, 85, 90, 95, 100, 125, 150, 175, 200, 225, 250, 275, 300, 325, 350, 375, 400, 425, 450, 475, 500, 525, 550, 575, 600, 625, 650, 675, 700, 725, 750, 775, 800, 825, 850, 875, 900, 925, 950, 975 or 1000 mg, 1.5, 2, 2.5, 3, 3.5, 4, 4.5, or 5 g.

[0370] A pharmaceutically acceptable carrier, for the provided compositions, includes a solid, semi-solid or liquid material that acts as a vehicle carrier or medium for the virus. Pharmaceutical compositions provided herein can be formulated in various forms, for example in solid, semi-solid, aqueous, liquid, powder or lyophilized form. Exemplary pharmaceutical compositions containing a virus provided herein include, but are not limited to, sterile injectable solutions, sterile packaged powders, eye drops, tablets, pills, powders, lozenges, sachets, cachets, elixirs, suspensions, emulsions, solutions, syrups, aerosols (as a solid or in a liquid medium), ointments, soft and hard gelatin capsules, and suppositories.

[0371] Examples of suitable pharmaceutical carriers are known in the art and include, but are not limited to, water, buffers, saline solutions, phosphate buffered saline solutions, various types of wetting agents, sterile solutions, alcohols, gum arabic, vegetable oils, benzyl alcohols, gelatin, glycerin, carbohydrates, such as lactose, sucrose, dextrose, amylose or starch, sorbitol, mannitol, magnesium stearate, talc, silicic acid, viscous paraffin, perfume oil, fatty acid monoglycerides and diglycerides, pentaerythritol fatty acid esters, hydroxy methylcellulose, powders, among others. Pharmaceutical compositions provided herein can contain other additives including, for example, antioxidants, preserving agents, analgesic agents, binders, disintegrants, coloring, diluents, excipients, extenders, glidants, solubilizers, stabilizers, tonicity agents, vehicles, viscosity agents, flavoring agents, sweetening agents, emulsions, such as oil/water emulsions, emulsifying and suspending agents, such as acacia, agar, alginic acid, sodium alginate, bentonite, carbomer, carrageenan, carboxymethylcellulose, cellulose, cholesterol, gelatin, hydroxyethyl cellulose, hydroxypropyl cellulose, hydroxypropyl methylcellulose, methylcellulose, octoxynol 9, oleyl alcohol, povidone, propylene glycol monostearate, sodium lauryl sulfate, sorbitan esters, stearyl alcohol, tragacanth, xanthan gum, and derivatives thereof, solvents, and miscellaneous ingredients, such as, but not limited to, crystalline cellulose, microcrystalline cellulose, citric acid, dextrin, liquid glucose, lactic acid, lactose, magnesium chloride, potassium metaphosphate, starch, among others. Such carriers and/or additives can be formulated by conventional methods and can be administered to the subject at a suitable dose. Stabilizing agents such as lipids, nuclease inhibitors, polymers, and chelating agents can preserve the compositions from degradation within the body. Other suitable formulations for use in a pharmaceutical composition can be found, for example, in Remington: The Science and Practice of Pharmacy (2005, Twenty-first edition, Gennaro & Gennaro, eds., Lippincott Williams and Wilkins).

[0372] Pharmaceutical formulations that include a virus provided herein for injection or mucosal delivery typically include aqueous solutions of the virus provided in a suitable buffer for injection or mucosal administration or lyophilized forms of the virus for reconstitution in a suitable buffer for injection or mucosal administration. Such formulations optionally can contain one or more pharmaceutically acceptable carriers and/or additives as described herein or known in the art. Liquid compositions for oral administration generally include aqueous solutions, suitably flavored syrups, aqueous or oil suspensions, and flavored emulsions with edible oils such as corn oil, cottonseed oil, sesame oil, coconut oil, or peanut oil, as well as elixirs and similar pharmaceutical vehicles.

[0373] Pharmaceutical compositions provided herein can be formulated to provide quick, sustained or delayed released of a virus as described herein by employing procedures known in the art. For preparing solid compositions such as tablets, a virus provided herein is mixed with a pharmaceutical carrier to form a solid composition. Optionally, tablets or pills are coated or otherwise compounded to provide a dosage form affording the advantage of prolonged action in the subject. For example, a tablet or pill contains an inner dosage and an outer dosage component, the latter being in the form of an envelope over the former. The two components can be separated by an enteric layer, for example, which serves to resist disintegration in the stomach and permit the inner component to pass intact into the duodenum or to be delayed in release. A variety of materials are used for such enteric layers or coatings, including, for example, a number of polymeric acids and mixtures of polymeric acids with such materials as shellac, cetyl alcohol, and cellulose acetate.

[0374] Compositions for inhalation or insufflation include solutions and suspensions in pharmaceutically acceptable, aqueous or organic solvents, or mixtures thereof, and powders. These liquid or solid compositions optionally can contain suitable pharmaceutically acceptable excipients and/or additives as described herein or known in the art. Such compositions are administered, for example, by the oral or nasal respiratory route for local or systemic effect. Compositions in pharmaceutically acceptable solvents are nebulized by use of inert gases. Nebulized solutions are inhaled, for example, directly from the nebulizing device, from an attached face mask tent, or from an intermittent positive pressure breathing machine. Solution, suspension, or powder compositions are administered, orally or nasally, for example, from devices which deliver the formulation in an appropriate manner such as, for example, use of an inhaler.

[0375] Pharmaceutical compositions provided herein can be formulated for transdermal delivery via a transdermal delivery devices (“patches”). Such transdermal patches are used to provide continuous or discontinuous infusion of a virus provided herein. The construction and use of transdermal patches for the delivery of pharmaceutical agents are performed according to methods known in the art. See, for example, U.S. Pat. No. 5,023,252. Such patches are constructed for continuous, pulsatile, or on-demand delivery of a virus provided herein.

[0376] Colloidal dispersion systems that can be used for delivery of viruses include macromolecule complexes, nanocapsules, microspheres, beads and lipid-based systems including oil-in-water emulsions (mixed), micelles, liposomes and lipoplexes. An exemplary colloidal system is a liposome. Organ-specific or cell-specific liposomes can be used in order to achieve delivery only to the desired tissue. The targeting of liposomes can be carried out by the person skilled in the art by applying commonly known methods. This targeting includes passive targeting (utilizing the natural tendency of the liposomes to distribute to cells of the RES in organs which contain sinusoidal capillaries) or active targeting (for example, by coupling the liposome to a specific ligand, for example, an antibody, a receptor, sugar, glycolipid and protein by methods know to those of skill in the art). Monoclonal antibodies can be used to target liposomes to specific tissues, for example, tumor tissue, via specific cell-surface ligands.

[0377] b. Combinations

[0378] Provided are combinations of an antibody, a virus and an additional agent, such as a second virus or other therapeutic or diagnostic agent. A combination can include an antibody and a virus with one or more additional viruses, including, for example, one or more additional diagnostic or therapeutic viruses. A combination can contain pharmaceutical compositions containing a virus provided herein or host cells containing a virus as described herein. A combination also can include any antibody, virus or reagent for effecting treatment or diagnosis in accord with the methods provided herein such as, for example, an antiviral or chemotherapeutic agent. Combinations also can contain a compound used for the modulation of gene expression from endogenous or heterologous genes encoded by the virus.

[0379] Combinations provided herein can contain an antibody, a virus and a therapeutic compound. Therapeutic compounds for the compositions provided herein can be, for example, an anti-cancer or chemotherapeutic compound. Exemplary therapeutic compounds include, for example, cytokines, growth factors, photosensitizing agents, radionuclides, toxins, siRNA molecules, enzyme/pro E drug pairs, anti-metabolites, signaling modulators, anti-cancer antibiotics, anti-cancer antibodies, angiogenesis inhibitors, chemotherapeutic compounds, antimetastatic compounds or a combination of any thereof. Viruses provided herein can be combined with an anti-cancer compound, such as a platinum coordination complex. Exemplary platinum coordination complexes include, for example, cisplatin, carboplatin, oxaliplatin, DWA2114R, NK121, IS 3 295, and 254-S. Exemplary chemotherapeutic agents also include, but are not limited to, methotrexate, vincristine, adriamycin, non-sugar containing chloroethylnitrosoureas, 5-fluorouracil, mitomycin C, bleomycin, doxorubicin, dacarbazine, taxol, fragyline, Meglamine GLA, valrubicin, carmustine, polifeprosan, MM1270, BAY 12-9566, RAS farnesyl transferase inhibitor, farnesyl transferase inhibitor, MMP, MTA/LY231514, lometrexol/LY264618, Glamolec, CI-994, TNP-470, Hycamtin/topotecan, PKC412, Valspodar/PSC833, Novantrone/mitoxantrone, Metaret/suramin, BB-94/batimastat, E7070, BCH-4556, CS-682, 9-AC, AG3340, AG3433, Incel/VX-710, VX-853, ZD0101, IS1641, ODN 698, TA 2516/marimastat, BB2516/marimastat, CDP 845, D2163, PD183805, DX8951f, Lemonal (DP-2202), FK 317, picibanil/OK-432, valrubicin/AD 32, strontium-89/Metastron, Temodal/temozolomide, Yewtaxan/paclitaxel, Taxol/paclitaxel, Paxex/paclitaxel, Cyclopax/oral paclitaxel, Xeloda/capecitabine, Furtulon/doxifluridine, oral taxoids, SPU-077/cisplatin, HMR 1275/flavopiridol, CP-358 (774)/EGFR, CP-609 (754)/RAS oncogene inhibitor, BMS-182751/oral platinum, UFT(Tegafur/Uracil), Ergamisol/levamisole, Campto/levamisole, Eniluracil/776C85/5FU enhancer, Camptosar/irinotecan, Tomudex/raltitrexed, Leustatin/cladribine, Caelyx/liposomal doxorubicin, Myocet/liposomal doxorubicin, Doxil/liposomal doxorubicin, Evacet/liposomal doxorubicin, Fludara/fludarabine, Pharmorubicin/epirubicin, DepoCyt, ZD 1839, LU 79553/Bis-Naphthalimide, LU 103793/Dolastatin, Gemzar/gemcitabine, ZD 0473/AnorMED, YM 116, Iodine seeds, CDK4 and CDK2 inhibitors, PARP inhibitors, D4809/dexifosfamide, Ifex/Mesnex/ifosfamide, Vumon/teniposide, Paraplatin/carboplatin, Platinol/cisplatin, VePesid/Eposin/Etopophos/etoposide, ZD 9331, Taxotere/docetaxel, prodrugs of guanine arabinoside, taxane analogs, nitrosoureas, alkylating agents such as melphalan and cyclophosphamide, aminoglutethimide, asparaginase, busulfan, carboplatin, chlorambucil, cytarabine HCl, dactinomycin, daunorubicin HCl, estramustine phosphate sodium, etoposide (VP16-213), floxuridine, fluorouracil (5-FU), flutamide, hydroxyurea (hydroxycarbamide), ifosfamide, interferon alfa-2a, interferon alfa-2b, leuprolide acetate (LHRH-releasing factor analogue), lomustine (CCNU), mechlorethamine HCl (nitrogen mustard), mercaptopurine, mesna, mitotane (o,p′-DDD), mitoxantrone HCl, octreotide, plicamycin, procarbazine HCl, streptozocin, tamoxifen citrate, thioguanine, thiotepa, vinblastine sulfate, amsacrine (m-AMSA), azacitidine, erythropoietin, hexamethylmelamine (HMM), interleukin 2, mitoguazone (methyl-GAG; methyl glyoxal bis-guanylhydrazone; MGBG), pentostatin (2′ deoxycoformycin), semustine (methyl-CCNU), teniposide (VM-26) and vindesine sulfate. Additional exemplary therapeutic compounds for the use in pharmaceutical compositions and combinations provided herein can be found elsewhere herein (see e.g., Section I for exemplary cytokines, growth factors, photosensitizing agents, radionuclides, toxins, siRNA molecules, enzyme/pro-drug pairs, anti-metabolites, signaling modulators, anti-cancer antibiotics, anti-cancer antibodies, angiogenesis inhibitors, and chemotherapeutic compounds).

[0380] In some examples, the combination can include additional therapeutic compounds such as, for example, compounds that are substrates for enzymes encoded and expressed by the virus, or other therapeutic compounds provided herein or known in the art to act in concert with a virus. For example, the virus can express an enzyme that converts a prodrug into an active chemotherapy drug for killing the cancer cell. Hence, combinations provided herein can contain a therapeutic compound, such as a prodrug. An exemplary virus/therapeutic compound combination can include a virus encoding Herpes simplex virus thymidine kinase with the prodrug ganciclovir. Additional exemplary enzyme/pro-drug pairs, for the use in combinations provided include, but are not limited to, varicella zoster thymidine kinase/ganciclovir, cytosine deaminase/5-fluorouracil, purine nucleoside phosphorylase/6-methylpurine deoxyriboside, beta lactamase/cephalosporin-doxorubicin, carboxypeptidase G2/4-[(2-chloroethyl)(2-mesyloxyethyl)amino]benzoyl-L-glutamic acid, cytochrome P450/acetaminophen, horseradish peroxidase/indole-3-acetic acid, nitroreductase/CB 1954, rabbit carboxylesterase/7-ethyl-10-[4-(1-piperidino)-1-piperidino]carbonyloxycamptothecin (CPT-11), mushroom tyrosinase/bis-(2-chloroethyl)amino-4-hydroxyphenylaminomethanone 28, beta galactosidase/1-chloromethyl-5-hydroxy-1,2-dihydro-3H-benz[e]indole, beta glucuronidase/epirubicin-glucuronide, thymidine phosphorylase/5′-deoxy-5-fluorouridine, deoxycytidine kinase/cytosine arabinoside, beta-lactamase and linamarase/linamarin. Additional exemplary prodrugs, for the use in combinations can also be found elsewhere herein (see e.g., Section I). Any of a variety of known combinations provided herein or otherwise known in the art can be included in the combinations provided herein.

[0381] In some examples, the combination can include compounds that can kill or inhibit viral growth or toxicity. Such compounds can be used to alleviate one or more adverse side effects that can result from viral infection (see, e.g. U.S. Patent Pub. No. US 2009-0162288-A1). Combinations provided herein can contain antifungal, anti-parasitic or antiviral compounds for treatment of infections. In some examples, the antiviral compound is a chemotherapeutic agent that inhibits viral growth or toxicity. Exemplary antifungal agents which can be included in a combination with a virus provided herein include, but are not limited to, amphotericin B, dapsone, fluconazole, flucytosine, griseofulvin, itraconazole, ketoconazole, miconazole, clotrimazole, nystatin, and combinations thereof. Exemplary antiviral agents can be included in a combination with a virus provided herein include, but are not limited to, cidofovir, alkoxyalkyl esters of cidofovir (CDV), cyclic CDV, and (S)-9-(3-hydroxy-2 phosphonylmethoxypropyl)adenine, 5-(dimethoxymethyl)-2′-deoxyuridine, isatin-beta-thiosemicarbazone, N-methanocarbathymidine, brivudine, 7-deazaneplanocin A, ST-246, Gleevec, 2′-beta-fluoro-2′,3′-dideoxyadenosine, indinavir, nelfinavir, ritonavir, nevirapine, AZT, ddI, ddC, and combinations thereof. Typically, combinations with an antiviral agent contain an antiviral agent known to be effective against the virus of the combination. For example, combinations can contain a vaccinia virus with an antiviral compound, such as cidofovir, alkoxyalkyl esters of cidofovir, ganciclovir, acyclovir, ST-246, Gleevec, and derivatives thereof.

[0382] In some examples, the combination can include a detectable compound. A detectable compound can include, for example, a ligand, substrate or other compound that can interact with and/or bind specifically to a protein or RNA encoded and expressed by the virus, and can provide a detectable signal, such as a signal detectable by tomographic, spectroscopic, magnetic resonance, or other known techniques. In some examples, the protein or RNA is an exogenous protein or RNA. In some examples, the protein or RNA expressed by the virus modifies the detectable compound where the modified compound emits a detectable signal. Exemplary detectable compounds can be, or can contain, an imaging agent such as a magnetic resonance, ultrasound or tomographic imaging agent, including a radionuclide. The detectable compound can include any of a variety of compounds as provided elsewhere herein or are otherwise known in the art. Exemplary proteins that can be expressed by the virus and a detectable compound combinations employed for detection include, but are not limited to luciferase and luciferin, β-galactosidase and (4,7,10-tri(acetic acid)-1-(2-β-galactopyranosylethoxy)-1,4,7,10-tetraazacyclododecane) gadolinium (Egad), and other combinations known in the art.

[0383] In some examples, the combination can include a gene expression modulating compound that regulates expression of one or more genes encoded by the virus. Compounds that modulate gene expression are known in the art, and include, but are not limited to, transcriptional activators, inducers, transcriptional suppressors, RNA polymerase inhibitors and RNA binding compounds such as siRNA or ribozymes. Any of a variety of gene expression modulating compounds known in the art can be included in the combinations provided herein. Typically, the gene expression modulating compound included with a virus in the combinations provided herein will be a compound that can bind, inhibit or react with one or more compounds, active in gene expression such as a transcription factor or RNA of the virus of the combination. An exemplary virus/expression modulator combinations can be a virus encoding a chimeric transcription factor complex having a mutant human progesterone receptor fused to a yeast GAL4 DNA-binding domain an activation domain of the herpes simplex virus protein VP16 and also containing a synthetic promoter containing a series of GAL4 recognition sequences upstream of the adenovirus major late E1B TATA box, where the compound can be RU486 (see, e.g., Yu et al., (2002) Mol Genet Genomics 268:169-178). A variety of other virus/expression modulator combinations known in the art also can be included in the combinations provided herein.

[0384] In some examples, the combination can contain nanoparticles. Nanoparticles can be designed such that they carry one or more therapeutic agents provided herein. Additionally, nanoparticles can be designed to carry a molecule that targets the nanoparticle to the tumor cells. In one non-limiting example, nanoparticles can be coated with a radionuclide and, optionally, an antibody immunoreactive with a tumor-associated antigen.

[0385] In some examples, the combination can contain one or more additional therapeutic and/or diagnostic viruses or other therapeutic and/or diagnostic microorganism (e.g. therapeutic and/or diagnostic bacteria) for diagnosis or treatment. Exemplary therapeutic and/or diagnostic viruses are known in the art and include, but are not limited to, therapeutic and/or diagnostic poxviruses, herpesviruses, adenoviruses, adeno-associated viruses, and reoviruses. Exemplary of such oncolytic viruses are described herein above.

[0386] c. Kits

[0387] The viruses, cells, pharmaceutical compositions or combinations provided herein can be packaged as kits. Kits can optionally include one or more components such as instructions for use, devices and additional reagents, and components, such as tubes, containers and syringes for practice of the methods. Exemplary kits can include an antibody, a virus, and can optionally include instructions for use, a device for detecting a virus in a subject, a device for administering the antibody to a subject, a device for administering the virus to a subject, or a device for administering an additional agent or compound to a subject.

[0388] In one example, a kit can contain instructions. Instructions typically include a tangible expression describing the virus and, optionally, other components included in the kit, and methods for administration, including methods for determining the proper state of the subject, the proper dosage amount, and the proper administration method, for administering the virus and antibiotic. Instructions can also include guidance for monitoring the subject over the duration of the treatment time.

[0389] In another example, a kit can contain a device for detecting a virus in a subject. Devices for detecting a virus in a subject can include a low light imaging device for detecting light, for example, emitted from luciferase, or fluoresced from fluorescent protein, such as a green or red fluorescent protein, a magnetic resonance measuring device such as an MRI or NMR device, a tomographic scanner, such as a PET, CT, CAT, SPECT or other related scanner, an ultrasound device, or other device that can be used to detect a protein expressed by the virus within the subject. Typically, the device of the kit will be able to detect one or more proteins expressed by the virus of the kit. Any of a variety of kits containing viruses and detection devices can be included in the kits provided herein, for example, a virus expressing luciferase and a low light imager or a virus expressing fluorescent protein, such as a green or red fluorescent protein, and a low light imager.

[0390] Kits provided herein also can include a device for administering a virus and antibiotic to a subject. Any of a variety of devices known in the art for administering medications, pharmaceutical compositions and vaccines can be included in the kits provided herein. Exemplary devices include, but are not limited to, a hypodermic needle, an intravenous needle, a catheter, a needle-less injection device, an inhaler and a liquid dispenser, such as an eyedropper. For example, a virus or antibiotic to be delivered systemically, for example, by intravenous injection, can be included in a kit with a hypodermic needle and syringe. Typically, the device for administering a virus or antibiotic of the kit will be compatible with the virus of the kit; for example, a needle-less injection device such as a high pressure injection device can be included in kits with viruses not damaged by high pressure injection, but is typically not included in kits with viruses damaged by high pressure injection.

[0391] Kits provided herein also can include a device for administering an additional agent or compound to a subject. Any of a variety of devices known in the art for administering medications to a subject can be included in the kits provided herein. Exemplary devices include, but are not limited to, a hypodermic needle, an intravenous needle, a catheter, a needle-less injection device, an inhaler and a liquid dispenser, such as an eyedropper. Typically the device for administering the compound of the kit will be compatible with the desired method of administration of the compound. For example, a compound to be delivered systemically or subcutaneously can be included in a kit with a hypodermic needle and syringe.

[0392] The kits provided herein also can include any device for applying energy to a subject, such as electromagnetic energy. Such devices include, but are not limited to, a laser, light-emitting diodes, fluorescent lamps, dichroic lamps, and a light box. Kits also can include devices to effect internal exposure of energy to a subject, such as an endoscope or fiber optic catheter.

[0393] 3. Dosages and Administration

[0394] A virus provided herein can be administered to a subject, including a subject having a tumor or having neoplastic cells, or a subject to be immunized, or a subject for gene therapy. An administered virus can be a virus provided herein or any other virus generated using the methods provided herein. In some examples, the virus administered is a virus containing a characteristic such as attenuated pathogenicity, low toxicity, preferential accumulation in tumor, ability to activate an immune response against tumor cells, high immunogenicity, replication competence and ability to express exogenous proteins, and combinations thereof.

[0395] a. Steps prior to administering the virus

[0396] In some examples, one or more steps can be performed prior to administration of the virus to the subject. Any of a variety of preceding steps can be performed, including, but not limited to diagnosing the subject with a condition appropriate for virus administration, determining the immunocompetence of the subject, immunizing the subject, treating the subject with a chemotherapeutic agent, treating the subject with radiation, or surgically treating the subject.

[0397] For examples that include administering a virus to a tumor-bearing subject for therapeutic purposes, the subject has typically been previously diagnosed with a neoplastic condition. Diagnostic methods also can include determining the type of neoplastic condition, determining the stage of the neoplastic conditions, determining the size of one or more tumors in the subject, determining the presence or absence of metastatic or neoplastic cells in the lymph nodes of the subject, or determining the presence of metastases of the subject. Some examples of therapeutic methods for administering a virus to a subject can include a step of determination of the size of the primary tumor or the stage of the neoplastic disease, and if the size of the primary tumor is equal to or above a threshold volume, or if the stage of the neoplastic disease is at or above a threshold stage, a virus is administered to the subject. In a similar example, if the size of the primary tumor is below a threshold volume, or if the stage of the neoplastic disease is at or below a threshold stage, the virus is not yet administered to the subject; such methods can include monitoring the subject until the tumor size or neoplastic disease stage reaches a threshold amount, and then administering the virus to the subject. Threshold sizes can vary according to several factors, including rate of growth of the tumor, ability of the virus to infect a tumor, and immunocompetence of the subject. Generally the threshold size will be a size sufficient for a virus to accumulate and replicate in or near the tumor without being completely removed by the host's immune system, and will typically also be a size sufficient to sustain a virus infection for a time long enough for the host to mount an immune response against the tumor cells, typically about one week or more, about ten days or more, or about two weeks or more. Exemplary threshold tumor sizes for viruses, such as vaccinia viruses, are at least about 100 mm³, at least about 200 mm³, at least about 300 mm³, at least about 400 mm³, at least about 500 mm³, at least about 750 mm³, at least about 1000 mm³, or at least about 1500 mm³. Threshold neoplastic disease stages also can vary according to several factors, including specific requirement for staging a particular neoplastic disease, aggressiveness of growth of the neoplastic disease, ability of the virus to infect a tumor or metastasis, and immunocompetence of the subject. Generally the threshold stage will be a stage sufficient for a virus to accumulate and replicate in a tumor or metastasis without being completely removed by the host's immune system, and will typically also be a size sufficient to sustain a virus infection for a time long enough for the host to mount an immune response against the neoplastic cells, typically about one week or more, about ten days or more, or about two weeks or more. Exemplary threshold stages are any stage beyond the lowest stage (e.g., Stage I or equivalent), or any stage where the primary tumor is larger than a threshold size, or any stage where metastatic cells are detected.

[0398] In other examples, prior to administering to the subject a virus, the immunocompetence of the subject can be determined. The methods of administering a virus to a subject provided herein can include causing or enhancing an immune response in a subject. Accordingly, prior to administering a virus to a subject, the ability of a subject to mount an immune response can be determined. Any of a variety of tests of immunocompetence known in the art can be performed in the methods provided herein. Exemplary immunocompetence tests can examine ABO hemagglutination titers (IgM), leukocyte adhesion deficiency (LAD), granulocyte function (NBT), T and B cell quantitation, tetanus antibody titers, salivary IgA, skin test, tonsil test, complement C3 levels, and factor B levels, and lymphocyte count. One skilled in the art can determine the desirability to administer a virus to a subject according to the level of immunocompetence of the subject, according to the immunogenicity of the virus, and, optionally, according to the immunogenicity of the neoplastic disease to be treated. Typically, a subject can be considered immunocompetent if the skilled artisan can determine that the subject is sufficiently competent to mount an immune response against the virus.

[0399] In some examples, the subject can be immunized prior to administering to the subject a virus according to the methods provided herein. Immunization can serve to increase the ability of a subject to mount an immune response against the virus, or increase the speed at which the subject can mount an immune response against a virus. Immunization also can serve to decrease the risk to the subject of pathogenicity of the virus. In some examples, the immunization can be performed with an immunization virus that is similar to the therapeutic virus to be administered. For example, the immunization virus can be a replication-incompetent variant of the therapeutic virus. In other examples, the immunization material can be digests of the therapeutic virus to be administered. Any of a variety of methods for immunizing a subject against a known virus are known in the art and can be used herein. In one example, vaccinia viruses treated with, for example, 1 microgram of psoralen and ultraviolet light at 365 nm for 4 minutes, can be rendered replication incompetent. In another example, the virus can be selected as the same or similar to a virus against which the subject has been previously immunized, e.g., in a childhood vaccination.

[0400] In another example, the subject can have administered thereto a virus without any previous steps of cancer treatment such as chemotherapy, radiation therapy or surgical removal of a tumor and/or metastases. The methods provided herein take advantage of the ability of the viruses to enter or localize near a tumor, where the tumor cells can be protected from the subject's immune system; the viruses can then proliferate in such an immunoprotected region and can also cause the release, typically a sustained release, of tumor antigens from the tumor to a location in which the subject's immune system can recognize the tumor antigens and mount an immune response. In such methods, existence of a tumor of sufficient size or sufficiently developed immunoprotected state can be advantageous for successful administration of the virus to the tumor, and for sufficient tumor antigen production. If a tumor is surgically removed, the viruses may not be able to localize to other neoplastic cells (e.g., small metastases) because such cells have not yet have matured sufficiently to create an immunoprotective environment in which the viruses can survive and proliferate, or even if the viruses can localize to neoplastic cells, the number of cells or size of the mass can be too small for the viruses to cause a sustained release of tumor antigens in order for the host to mount an anti-tumor immune response. Thus, for example, provided herein are methods of treating a tumor or neoplastic disease in which viruses are administered to a subject with a tumor or neoplastic disease without removing the primary tumor, or to a subject with a tumor or neoplastic disease in which at least some tumors or neoplastic cells are intentionally permitted to remain in the subject. In other typical cancer treatment methods such as chemotherapy or radiation therapy, such methods typically have a side effect of weakening the subject's immune system. This treatment of a subject by chemotherapy or radiation therapy can reduce the subject's ability to mount an anti-tumor immune response. Thus, for example, provided herein are methods of treating a tumor or neoplastic disease in which viruses are administered to a subject with a tumor or neoplastic disease without treating the subject with an immune system-weakening therapy, such as chemotherapy or radiation therapy.

[0401] In an alternative example, prior to administration of a virus to the subject, the subject can be treated in one or more cancer treatment steps that do not remove the primary tumor or that do not weaken the immune system of the subject. A variety of more sophisticated cancer treatment methods are being developed in which the tumor can be treated without surgical removal or immune-system weakening therapy. Exemplary methods include administering a compound that decreases the rate of proliferation of the tumor or neoplastic cells without weakening the immune system (e.g., by administering tumor suppressor compounds or by administering tumor cell-specific compounds) or administering an angiogenesis-inhibiting compound. Thus, combined methods that include administering a virus to a subject can further improve cancer therapy. Thus, provided herein are methods of administering a virus to a subject, along with prior to or subsequent to, for example, administering a compound that slows tumor growth without weakening the subject's immune system or a compound that inhibits vascularization of the tumor.

[0402] b. Mode of Administration

[0403] Any mode of administration of a virus to a subject can be used, provided the mode of administration permits the virus to enter a tumor or metastasis or reach a desired target. Modes of administration can include, but are not limited to, systemic, parenteral, intravenous, intraperitoneal, subcutaneous, intramuscular, transdermal, intradermal, intra-arterial (e.g., hepatic artery infusion), intravesicular perfusion, intrapleural, intraarticular, topical, intratumoral, intralesional, endoscopic, multipuncture (e.g., as used with smallpox vaccines), inhalation, percutaneous, subcutaneous, intranasal, intratracheal, oral, intracavity (e.g., administering to the bladder via a catheter, administering to the gut by suppository or enema), vaginal, rectal, intracranial, intraprostatic, intravitreal, aural, or ocular administration. In some examples, a diagnostic or therapeutic agent as described elsewhere herein also can be similarly administered.

[0404] One skilled in the art can select any mode of administration compatible with the subject, virus and antibiotic, and that also is likely to result in the virus reaching tumors and/or metastases and the antibiotic effecting commensal or gut bacteria. The route of administration can be selected by one skilled in the art according to any of a variety of factors, including the nature of the disease, the kind of tumor, and the particular virus contained in the pharmaceutical composition. Administration to the target site can be performed, for example, by ballistic delivery, as a colloidal dispersion system, or systemic administration can be performed by injection into an artery.

[0405] c. Dosages and Dosage Regime

[0406] The dosage regimen can be any of a variety of methods and amounts, and can be determined by one skilled in the art according to known clinical factors. As is known in the medical arts, dosages for any one patient can depend on many factors, including the subject's species, size, body surface area, age, sex, immunocompetence, and general health, the particular virus to be administered, duration and route of administration, the kind and stage of the disease, for example, tumor size, and other treatments or compounds, such as chemotherapeutic drugs, being administered concurrently. In addition to the above factors, such levels can be affected by the infectivity of the virus, and the nature of the virus, as can be determined by one skilled in the art.

[0407] In the present methods, appropriate minimum dosage levels and dosage regimes of viruses can be levels sufficient for the virus to survive, grow and replicate in a tumor or metastasis. Generally, the virus is administered in an amount that is at least or about or is 1×10⁵ pfu at least one time over a cycle of administration. Exemplary minimum levels for administering a virus to a 65 kg human can include at least about 1×10⁵ plaque forming units (pfu), at least about 5×10⁵ pfu, at least about 1×10⁶ pfu, at least about 5×10⁶ pfu, at least about 1×10⁷ pfu, at least about 1×10⁸ pfu, at least about 1×10⁹ pfu, or at least about 1×10¹⁰ pfu. For example, the virus is administered in an amount that is at least or about or is 1×10⁵ pfu, 1×10⁶ pfu, 1×10⁷ pfu, 1×10⁸ pfu, 1×10⁹ pfu, 1×10¹° pfu, 1×10¹¹ pfu, 1×10¹² pfu, 1×10¹³ pfu, or 1×10¹⁴ pfu at least one time over a cycle of administration.

[0408] In the dosage regime, the amount of virus can be administered as a single administration or multiple times over the cycle of administration. Hence, the methods provided herein can include a single administration of a virus to a subject or multiple administrations of a virus to a subject. In some examples, a single administration is sufficient to establish a virus in a tumor, where the virus can proliferate and can cause or enhance an anti-tumor response in the subject; such methods do not require additional administrations of a virus in order to cause or enhance an anti-tumor response in a subject, which can result, for example in inhibition of tumor growth, inhibition of metastasis growth or formation, reduction in tumor or size, elimination of a tumor or metastasis, inhibition or prevention of recurrence of a neoplastic disease or new tumor formation, or other cancer therapeutic effects.

[0409] In other examples, a virus can be administered on different occasions, separated in time typically by at least one day. For example, a virus can be administered two times, three time, four times, five times, or six times or more, with one day or more, two days or more, one week or more, or one month or more time between administrations. Separate administrations can increase the likelihood of delivering a virus to a tumor or metastasis, where a previous administration has been ineffective in delivering a virus to a tumor or metastasis. Separate administrations can increase the locations on a tumor or metastasis where virus proliferation can occur or can otherwise increase the titer of virus accumulated in the tumor, which can increase the scale of release of antigens or other compounds from the tumor in eliciting or enhancing a host's anti-tumor immune response, and also can, optionally, increase the level of virus-based tumor lysis or tumor cell death. Separate administrations of a virus can further extend a subject's immune response against viral antigens, which can extend the host's immune response to tumors or metastases in which viruses have accumulated, and can increase the likelihood of a host mounting an anti-tumor immune response.

[0410] When separate administrations are performed, each administration can be a dosage amount that is the same or different relative to other administration dosage amounts. In one example, all administration dosage amounts are the same. In other examples, a first dosage amount can be a larger dosage amount than one or more subsequent dosage amounts, for example, at least 10× larger, at least 100× larger, or at least 1000× larger than subsequent dosage amounts. In one example of a method of separate administrations in which the first dosage amount is greater than one or more subsequent dosage amounts, all subsequent dosage amounts can be the same, smaller amount relative to the first administration.

[0411] Separate administrations can include any number of two or more administrations, including two, three, four, five or six administrations. One skilled in the art can readily determine the number of administrations to perform or the desirability of performing one or more additional administrations according to methods known in the art for monitoring therapeutic methods and other monitoring methods provided herein. Accordingly, the methods provided herein include methods of providing to the subject one or more administrations of a virus, where the number of administrations can be determined by monitoring the subject, and, based on the results of the monitoring, determining whether or not to provide one or more additional administrations. Deciding on whether or not to provide one or more additional administrations can be based on a variety of monitoring results, including, but not limited to, indication of tumor growth or inhibition of tumor growth, appearance of new metastases or inhibition of metastasis, the subject's anti-virus antibody titer, the subject's anti-tumor antibody titer, the overall health of the subject, the weight of the subject, the presence of virus solely in tumor and/or metastases, the presence of virus in normal tissues or organs.

[0412] The time period between administrations can be any of a variety of time periods. The time period between administrations can be a function of any of a variety of factors, including monitoring steps, as described in relation to the number of administrations, the time period for a subject to mount an immune response, the time period for a subject to clear the virus from normal tissue, or the time period for virus proliferation in the tumor or metastasis. In one example, the time period can be a function of the time period for a subject to mount an immune response; for example, the time period can be more than the time period for a subject to mount an immune response, such as more than about one week, more than about ten days, more than about two weeks, or more than about a month; in another example, the time period can be less than the time period for a subject to mount an immune response, such as less than about one week, less than about ten days, less than about two weeks, or less than about a month. In another example, the time period can be a function of the time period for a subject to clear the virus from normal tissue; for example, the time period can be more than the time period for a subject to clear the virus from normal tissue, such as more than about a day, more than about two days, more than about three days, more than about five days, or more than about a week. In another example, the time period can be a function of the time period for virus proliferation in the tumor or metastasis; for example, the time period can be more than the amount of time for a detectable signal to arise in a tumor or metastasis after administration of a virus expressing a detectable marker, such as about 3 days, about 5 days, about a week, about ten days, about two weeks, or about a month.

[0413] For example, an amount of virus is administered two times, three times, four times, five times, six times or seven times over a cycle of administration. The amount of virus can be administered on the first day of the cycle, the first and second day of the cycle, each of the first three consecutive days of the cycle, each of the first four consecutive days of the cycle, each of the first five consecutive days of the cycle, each of the first six consecutive days of the cycle, or each of the first seven consecutive days of the cycle. Generally, the cycle of administration is 7 days, 14 days, 21 days or 28 days. Depending on the responsiveness or prognosis of the patient the cycle of administration is repeated over the course of several months or years.

[0414] Generally, appropriate maximum dosage levels or dosage regimes of viruses are levels that are not toxic to the host, levels that do not cause splenomegaly of 3 times or more, levels that do not result in colonies or plaques in normal tissues or organs after about 1 day or after about 3 days or after about 7 days.

[0415] d. Combination Therapy

[0416] Also provided are methods in which an additional therapeutic substance, such as a different therapeutic virus or a therapeutic compound is administered. These can be administered simultaneously, sequentially or intermittently with the antibiotic and the virus. The additional therapeutic substance can interact with the virus or a gene product thereof, or the additional therapeutic substance can act independently of the virus.

[0417] Combination therapy treatment has advantages in that: 1) it avoids single agent resistance; 2) in a heterogeneous tumor population, it can kill cells by different mechanisms; and 3) by selecting drugs with non-overlapping toxicities, each agent can be used at full dose to elicit maximal efficacy and synergistic effect. Combination therapy can be done by combining a diagnostic/therapeutic virus with one or more of the following anti-cancer agents: chemotherapeutic agents, therapeutic antibodies, siRNAs, toxins, enzyme-prodrug pairs or radiation.

[0418] i. Administering a Plurality of Viruses

[0419] Methods are provided for administering to a subject an antibiotic and two or more viruses. Administration can be effected simultaneously, sequentially or intermittently. The plurality of viruses can be administered as a single composition or as two or more compositions. The two or more viruses can include at least two viruses. In a particular example, where there are two viruses, both viruses are vaccinia viruses. In another example, one virus is a vaccinia virus and the second virus is any one of an adenovirus, an adeno-associated virus, a retrovirus, a herpes simplex virus, a reovirus, a mumps virus, a foamy virus, an influenza virus, a myxoma virus, a vesicular stomatitis virus, or any other virus described herein or known in the art. Viruses can be chosen based on the pathway on which they act. For example, a virus that targets an activated Ras pathway can be combined with a virus that targets tumor cells defective in p53 expression.

[0420] The plurality of viruses can be provided as combinations of compositions containing and/or as kits that include the viruses packaged for administration and optionally including instructions therefore. The compositions can contain the viruses formulated for single dosage administration (i.e., for direct administration) and can require dilution or other additions.

[0421] In one example, at least one of the viruses is a modified virus such as those provided herein, having a characteristic such as low pathogenicity, low toxicity, preferential accumulation in tumor, ability to activate an immune response against tumor cells, immunogenic, replication competent, ability to express exogenous proteins, and combinations thereof. The viruses can be administered at approximately the same time, or can be administered at different times. The viruses can be administered in the same composition or in the same administration method, or can be administered in separate composition or by different administration methods.

[0422] The time period between administrations can be any time period that achieves the desired effects, as can be determined by one skilled in the art. Selection of a time period between administrations of different viruses can be determined according to parameters similar to those for selecting the time period between administrations of the same virus, including results from monitoring steps, the time period for a subject to mount an immune response, the time period for a subject to clear virus from normal tissue, or the time period for virus proliferation in the tumor or metastasis. In one example, the time period can be a function of the time period for a subject to mount an immune response; for example, the time period can be more than the time period for a subject to mount an immune response, such as more than about one week, more than about ten days, more than about two weeks, or more than about a month; in another example, the time period can be less than the time period for a subject to mount an immune response, such as less than about one week, less than about ten days, less than about two weeks, or less than about a month. In another example, the time period can be a function of the time period for a subject to clear the virus from normal tissue; for example, the time period can be more than the time period for a subject to clear the virus from normal tissue, such as more than about a day, more than about two days, more than about three days, more than about five days, or more than about a week. In another example, the time period can be a function of the time period for virus proliferation in the tumor or metastasis; for example, the time period can be more than the amount of time for a detectable signal to arise in a tumor or metastasis after administration of a virus expressing a detectable marker, such as about 3 days, about 5 days, about a week, about ten days, about two weeks, or about a month.

[0423] ii. Therapeutic Compounds

[0424] Any therapeutic or anti-cancer agent can be used as the second, therapeutic or anti-cancer agent in the combined cancer treatment methods provided herein. The methods can include administering one or more therapeutic compounds to the subject in addition to administering a virus or plurality thereof to a subject. Therapeutic compounds can act independently, or in conjunction with the virus, for tumor therapeutic effects.

[0425] Therapeutic compounds that can act independently include any of a variety of known chemotherapeutic compounds that can inhibit tumor growth, inhibit metastasis growth and/or formation, decrease the size of a tumor or metastasis, eliminate a tumor or metastasis, without reducing the ability of a virus to accumulate in a tumor, replicate in the tumor, and cause or enhance an anti-tumor immune response in the subject.

[0426] Therapeutic compounds that act in conjunction with the viruses include, for example, compounds that alter the expression of the viruses or compounds that can interact with a virally-expressed gene, or compounds that can inhibit virus proliferation, including compounds toxic to the virus. Therapeutic compounds that can act in conjunction with the virus include, for example, therapeutic compounds that increase the proliferation, toxicity, tumor cell killing or immune response eliciting properties of a virus, and also can include, for example, therapeutic compounds that decrease the proliferation, toxicity or cell killing properties of a virus. Optionally, the therapeutic agent can exhibit or manifest additional properties, such as, properties that permit its use as an imaging agent, as described elsewhere herein.

[0427] Therapeutic compounds also include, but are not limited to, chemotherapeutic agents, nanoparticles, radiation therapy, siRNA molecules, enzyme/pro-drug pairs, photosensitizing agents, toxins, microwaves, a radionuclide, an angiogenesis inhibitor, a mitosis inhibitor protein (e.g., cdc6), an antitumor oligopeptide (e.g., antimitotic oligopeptides, high affinity tumor-selective binding peptides), a signaling modulator, anti-cancer antibiotics, or a combination thereof.

[0428] Exemplary photosensitizing agents include, but are not limited to, for example, indocyanine green, toluidine blue, aminolevulinic acid, texaphyrins, benzoporphyrins, phenothiazines, phthalocyanines, porphyrins such as sodium porfimer, chlorins such as tetra(m-hydroxyphenyl)chlorin or tin(IV) chlorin e6, purpurins such as tin ethyl etiopurpurin, purpurinimides, bacteriochlorins, pheophorbides, pyropheophorbides or cationic dyes. In one example, a vaccinia virus, such as a vaccinia virus provided herein, is administered to a subject having a tumor, cancer or metastasis in combination with a photosensitizing agent.

[0429] Radionuclides, which depending up the radionuclide, amount and application can be used for diagnosis and/or for treatment. They include, but are not limited to, for example, a compound or molecule containing ³²Phosphorus, ⁶⁰Cobalt, ⁹⁰Yttrium, ⁹⁹Technitium, ¹⁰³Palladium, ¹⁰⁶Ruthenium, ¹¹¹Indium, ¹¹⁷Lutetium, ¹²⁵Iodine, ¹³¹Iodine, ¹³⁷Cesium, ¹⁵³Samarium, ¹⁸⁶Rhenium, ¹⁸⁸Rhenium, ¹⁹²Iridium, ¹⁹⁸Gold, ²¹¹Astatine, ²¹²Bismuth or ²¹³Bismuth. In one example, a vaccinia virus, such as a vaccinia virus provided herein, is administered to a subject having a tumor, cancer or metastasis in combination with a radionuclide.

[0430] Toxins include, but are not limited to, chemotherapeutic compounds such as, but not limited to, 5-fluorouridine, calicheamicin and maytansine. Signaling modulators include, but are not limited to, for example, inhibitors of macrophage inhibitory factor, toll-like receptor agonists and stat3 inhibitors. In one example, a vaccinia virus, such as a vaccinia virus provided herein, is administered to a subject having a tumor, cancer or metastasis in combination with a toxin or a signaling modulator.

[0431] Combination therapy between chemotherapeutic agents and therapeutic viruses can be effective/curative in situations when single agent treatment is not effective. Chemotherapeutic compounds include, but are not limited to, alkylating agents such as thiotepa and cyclophosphamide; alkyl sulfonates such as busulfan, improsulfan and piposulfan; aziridines such as benzodepa, carboquone, meturedepa and uredepa; ethylenimine and methylmelamines, including altretamine, triethylenemelamine, triethylenephosphoramide, triethylenethiophosphoramide and trimethylmelamine nitrogen mustards such as chlorambucil, chlornaphazine, chlorophosphamide, estramustine, ifosfamide, mechlorethamine, mechlorethamine oxide hydrochloride, melphalan, novobiocin, phenesterine, prednimustine, trofosfamide, uracil mustard; nitrosoureas such as carmustine, chlorozotocin, fotemustine, lomustine, nimustine, ranimustine; antibiotics such as aclacinomycins, actinomycin, anthramycin, azaserine, bleomycins, cactinomycin, calicheamicin, carubicin, caminomycin, carzinophilin, chromomycins, dactinomycin, daunorubicin, detorubicin, 6-diazo-5-oxo-L-norleucine, doxorubicin, epirubicin, esorubicin, idarubicin, marcellomycin, mitomycins, mycophenolic acid, nogalamycin, olivomycins, peplomycin, porfiromycin, puromycin, quelamycin, rodorubicin, streptonigrin, streptozocin, tubercidin, ubenimex, zinostatin, zorubicin; anti-metabolites such as methotrexate and 5-fluorouracil (5-FU); folic acid analogues such as denopterin, methotrexate, pteropterin, trimetrexate; purine analogs such as fludarabine, 6-mercaptopurine, thiamiprine, thioguanine; pyrimidine analogs such as ancitabine, azacitidine, 6-azauridine, carmofur, cytarabine, dideoxyuridine, doxifluridine, enocitabine, floxuridine; androgens such as calusterone, dromostanolone propionate, epitiostanol, mepitiostane, testolactone; anti-adrenals such as aminoglutethimide, mitotane, trilostane; folic acid replenisher such as folinic acid; aceglatone; aldophosphamide glycoside; aminolevulinic acid; amsacrine; bestrabucil; bisantrene; edatrexate; defosfamide; demecolcine; diaziquone; eflornithine; elliptinium acetate; etoglucid; gallium nitrate; hydroxyurea; lentinan; lonidamine; mitoguazone; mitoxantrone; mopidamol; nitracrine; pentostatin; phenamet; pirarubicin; podophyllinic acid; 2-ethylhydrazide; procarbazine; polysaccharide-K; razoxane; sizofuran; spirogermanium; tenuazonic acid; triaziquone; 2,2′,2″-trichlorotriethylamine; urethan; vindesine; dacarbazine; mannomustine; mitobronitol; mitolactol; pipobroman; gacytosine; cytosine arabinoside; cyclophosphamide; thiotepa; taxoids, e.g., paclitaxel and docetaxel; chlorambucil; gemcitabine; 6-thioguanine; mercaptopurine; methotrexate; platinum analogs such as cisplatin and carboplatin; vinblastine; platinum; etoposide (VP-16); ifosfamide; mitomycin C; mitoxantrone; vincristine; vinorelbine; Navelbine; Novantrone; teniposide; daunomycin; aminopterin; Xeloda; ibandronate; CPT11; topoisomerase inhibitor RFS 2000; difluoromethylornithine (DMFO); retinoic acid; esperamycins; capecitabine; and pharmaceutically acceptable salts, acids or derivatives of any of the above. Also included are anti-hormonal agents that act to regulate or inhibit hormone action on tumors such as anti-estrogens including for example tamoxifen, raloxifene, aromatase inhibiting 4(5)-imidazoles, 4-hydroxytamoxifen, trioxifene, keoxifene, LY117018, onapristone and toremifene (Fareston); and antiandrogens such as flutamide, nilutamide, bicalutamide, leuprolide and goserelin; and pharmaceutically acceptable salts, acids or derivatives of any of the above. Such chemotherapeutic compounds that can be used herein include compounds whose toxicities preclude use of the compound in general systemic chemotherapeutic methods. Chemotherapeutic agents also include new classes of targeted chemotherapeutic agents such as, for example, imatinib (sold by Novartis under the trade name Gleevec in the United States), gefitinib (developed by AstraZeneca under the trade name Iressa) and erlotinib. Particular chemotherapeutic agents include, but are not limited to, cisplatin, carboplatin, oxaliplatin, DWA2114R, NK121, IS 3 295, 254-S, vincristine, prednisone, doxorubicin and L-asparaginase; mechlorethamine, vincristine, procarbazine and prednisone (MOPP), cyclophosphamide, vincristine, procarbazine and prednisone (C-MOPP), bleomycin, vinblastine, gemcitabine and 5-fluorouracil. Exemplary chemotherapeutic agents are, for example, cisplatin, carboplatin, oxaliplatin, DWA2114R, NK121, IS 3 295, and 254-S. In a non-limiting example, a vaccinia virus, such as a vaccinia virus provided herein, is administered to a subject having a tumor, cancer or metastasis in combination with a platinum coordination complex, such as cisplatin, carboplatin, oxaliplatin, DWA2114R, NK121, IS 3 295, and 254-S. Tumors, cancers and metastasis can be any of those provided herein, and in particular, can be a pancreatic tumor, an ovarian tumor, a lung tumor, a colon tumor, a prostate tumor, a cervical tumor or a breast tumor; exemplary tumors are pancreatic and ovarian tumors. Tumors, cancers and metastasis can be a monotherapy-resistant tumor such as, for example, one that does not respond to therapy with virus alone or anti-cancer agent alone, but that does respond to therapy with a combination of virus and anti-cancer agent. Typically, a therapeutically effective amount of virus is systemically administered to the subject and the virus localizes and accumulates in the tumor. Subsequent to administering the virus, the subject is administered a therapeutically effective amount of an anti-cancer agent, such as cisplatin. In one example, cisplatin is administered once-daily for five consecutive days. One of skill in the art could determine when to administer the anti-cancer agent subsequent to the virus using, for example, in vivo animal models. Using the methods provided herein, administration of a virus and anti-cancer agent, such as cisplatin can cause a reduction in tumor volume, can cause tumor growth to stop or be delayed or can cause the tumor to be eliminated from the subject. The status of tumors, cancers and metastasis following treatment can be monitored using any of the methods provided herein and known in the art.

[0432] Exemplary anti-cancer antibiotics include, but are not limited to, anthracyclines such as doxorubicin hydrochloride (adriamycin), idarubicin hydrochloride, daunorubicin hydrochloride, aclarubicin hydrochloride, epirubicin hydrochloride and pirarubicin hydrochloride, phleomycins such as phleomycin and peplomycin sulfate, mitomycins such as mitomycin C, actinomycins such as actinomycin D, zinostatin stimalamer and polypeptides such as neocarzinostatin. In one example, a vaccinia virus, such as a vaccinia virus provided herein, is administered to a subject having a tumor, cancer or metastasis in combination with an anti-cancer antibiotic.

[0433] In one example, nanoparticles can be designed such that they carry one or more therapeutic agents provided herein. Additionally, nanoparticles can be designed to carry a molecule that targets the nanoparticle to the tumor cells. In one non-limiting example, nanoparticles can be coated with a radionuclide and, optionally, an antibody immunoreactive with a tumor-associated antigen. In one example, a vaccinia virus, such as a vaccinia virus provided herein, is administered to a subject having a tumor, cancer or metastasis in combination with a nanoparticle carrying any of the therapeutic agents provided herein.

[0434] Radiation therapy has become a foremost choice of treatment for a majority of cancer patients. The wide use of radiation treatment stems from the ability of gamma-irradiation to induce irreversible damage in targeted cells with the preservation of normal tissue function. Ionizing radiation triggers apoptosis, the intrinsic cellular death machinery in cancer cells, and the activation of apoptosis seems to be the principal mode by which cancer cells die following exposure to ionizing radiation. In one example, a vaccinia virus, such as a vaccinia virus provided herein, is administered to a subject having a tumor, cancer or metastasis in combination with radiation therapy.

[0435] Thus, provided herein are methods of administering to a subject one or more therapeutic compounds that can act in conjunction with the virus to increase the proliferation, toxicity, tumor cell killing, or immune response eliciting properties of a virus. Also provided herein are methods of administering to a subject one or more therapeutic compounds that can act in conjunction with the virus to decrease the proliferation, toxicity, or cell killing properties of a virus. Therapeutic compounds to be administered can be any of those provided herein or in the art.

[0436] Therapeutic compounds that can act in conjunction with the virus to increase the proliferation, toxicity, tumor cell killing or immune response eliciting properties of a virus are compounds that can alter gene expression, where the altered gene expression can result in an increased killing of tumor cells or an increased anti-tumor immune response in the subject. A gene expression-altering compound can, for example, cause an increase or decrease in expression of one or more viral genes, including endogenous viral genes and/or exogenous viral genes. For example, a gene expression-altering compound can induce or increase transcription of a gene in a virus such as an exogenous gene that can cause cell lysis or cell death, that can provoke an immune response, that can catalyze conversion of a prodrug-like compound, or that can inhibit expression of a tumor cell gene. Any of a wide variety of compounds that can alter gene expression are known in the art, including IPTG and RU486. Exemplary genes whose expression can be up-regulated include proteins and RNA molecules, including toxins, enzymes that can convert a prodrug to an anti-tumor drug, cytokines, transcription regulating proteins, siRNA and ribozymes. In another example, a gene expression-altering compound can inhibit or decrease transcription of a gene in a virus such as a heterologous gene that can reduce viral toxicity or reduces viral proliferation. Any of a variety of compounds that can reduce or inhibit gene expression can be used in the methods provided herein, including siRNA compounds, transcriptional inhibitors or inhibitors of transcriptional activators. Exemplary genes whose expression can be down-regulated include proteins and RNA molecules, including viral proteins or RNA that suppress lysis, nucleotide synthesis or proliferation, and cellular proteins or RNA molecules that suppress cell death, immunoreactivity, lysis, or viral replication.

[0437] In another example, therapeutic compounds that can act in conjunction with the virus to increase the proliferation, toxicity, tumor cell killing, or immune response eliciting properties of a virus are compounds that can interact with a virally expressed gene product, and such interaction can result in an increased killing of tumor cells or an increased anti-tumor immune response in the subject. A therapeutic compound that can interact with a virally-expressed gene product can include, for example a prodrug or other compound that has little or no toxicity or other biological activity in its subject-administered form, but after interaction with a virally expressed gene product, the compound can develop a property that results in tumor cell death, including but not limited to, cytotoxicity, ability to induce apoptosis, or ability to trigger an immune response. In one non-limiting example, the virus carries an enzyme into the cancer cells. Once the enzyme is introduced into the cancer cells, an inactive form of a chemotherapy drug (i.e., a prodrug) is administered. When the inactive prodrug reaches the cancer cells, the enzyme converts the prodrug into the active chemotherapy drug, so that it can kill the cancer cell. Thus, the treatment is targeted only to cancer cells and does not affect normal cells. The prodrug can be administered concurrently with, or sequentially to, the virus. A variety of prodrug-like substances are known in the art and an exemplary set of such compounds are disclosed elsewhere herein, where such compounds can include ganciclovir, 5-fluorouracil, 6-methylpurine deoxyriboside, cephalosporin-doxorubicin, 4-[(2-chloroethyl)(2-mesyloxyethyl)amino]benzoyl-L-glutamic acid, acetaminophen, indole-3-acetic acid, CB1954, 7-ethyl-10-[4-(1-piperidino)-1-piperidino]carbonyloxycamptothecin, bis-(2-chloroethyl)amino-4-hydroxyphenyl-aminomethanone 28, 1-chloromethyl-5-hydroxy-1,2-dihydro-3H-benz[e]indole, epirubicin-glucuronide, 5′-deoxy-5-fluorouridine, cytosine arabinoside, linamarin, and a nucleoside analogue (e.g., fluorouridine, fluorodeoxyuridine, fluorouridine arabinoside, cytosine arabinoside, adenine arabinoside, guanine arabinoside, hypoxanthine arabinoside, 6-mercaptopurineriboside, thioguanine riboside, nebularine, 5-iodouridine, 5-iododeoxyuridine, 5-bromodeoxyuridine, 5-vinyldeoxyuridine, 9-[(2-hydroxy)ethoxy]methylguanine (acyclovir), 9-[(2-hydroxy-1-hydroxymethyl)-ethoxy]methylguanine (DHPG), azauridine, azacytidine, azidothymidine, dideoxyadenosine, dideoxycytidine, dideoxyinosine, dideoxyguanosine, dideoxythymidine, 3′-deoxyadenosine, 3′-deoxycytidine, 3′-deoxyinosine, 3′-deoxyguanosine, 3′-deoxythymidine).

[0438] In another example, therapeutic compounds that can act in conjunction with the virus to decrease the proliferation, toxicity or cell killing properties of a virus are compounds that can inhibit viral replication, inhibit viral toxins or cause viral death. A therapeutic compound that can inhibit viral replication, inhibit viral toxins, or cause viral death can generally include a compound that can block one or more steps in the viral life cycle, including, but not limited to, compounds that can inhibit viral DNA replication, viral RNA transcription, viral coat protein assembly, outer membrane or polysaccharide assembly. Any of a variety of compounds that can block one or more steps in a viral life cycle are known in the art, including any known antiviral compound (e.g., cidofovir), viral DNA polymerase inhibitors, viral RNA polymerase inhibitors, inhibitors of proteins that regulate viral DNA replication or RNA transcription. In another example, a virus can contain a gene encoding a viral life cycle protein, such as DNA polymerase or RNA polymerase that can be inhibited by a compound that is, optionally, non-toxic to the host organism.

[0439] In addition to combination therapy between chemotherapeutic agents and a virus provided herein, other more complex combination therapy strategies could be applied as well. For example, a combination therapy can include chemotherapeutic agents, therapeutic antibodies, and a virus provided herein. Alternatively, another combination therapy can be the combination of radiation, therapeutic antibodies, and a virus provided herein. Therefore, the concept of combination therapy also can be based on the application of a virus provided herein virus along with one or more of the following therapeutic modalities, namely, chemotherapeutic agents, radiation therapy, therapeutic antibodies, hyper- or hypothermia therapy, siRNA, diagnostic/therapeutic bacteria, diagnostic/therapeutic mammalian cells, immunotherapy, and/or targeted toxins (delivered by antibodies, liposomes and nanoparticles).

[0440] Effective delivery of each components of the combination therapy is an important aspect of the methods provided herein. In accordance with one aspect, the modes of administration discussed below exploit one of more of the key features: (i) delivery of a virus provided herein to the tumors by a mode of administration effect to achieve highest titer of virus and highest therapeutic effect; (ii) delivery of any other mentioned therapeutic modalities to the tumor by a mode of administration to achieve the optimal therapeutic effect. The dose scheme of the combination therapy administered is such that the combination of the two or more therapeutic modalities is therapeutically effective. Dosages will vary in accordance with such factors as the age, health, sex, size and weight of the patient, the route of administration, the toxicity of the drugs, frequency of treatment and the relative susceptibilities of the cancer to each of the therapeutic modalities.

[0441] For combination therapies with chemotherapeutic compounds, dosages for the administration of such compounds are known in the art or can be determined by one skilled in the art according to known clinical factors (e.g., subject's species, size, body surface area, age, sex, immunocompetence, and general health, duration and route of administration, the kind and stage of the disease, for example, tumor size, and other viruses, treatments, or compounds, such as other chemotherapeutic drugs, being administered concurrently). In addition to the above factors, such levels can be affected by the infectivity of the virus, and the nature of the virus, as can be determined by one skilled in the art. For example, cisplatin (also called cis-platinum, platinol; cis-diamminedichloroplatinum; and cDDP) is representative of a broad class of water-soluble, platinum coordination compounds frequently employed in the therapy of testicular cancer, ovarian tumors and a variety of other cancers. (See, e.g., Blumenreich et al. (1985) Cancer 55(5): 1118-1122; Forastiere et al. (2001) J. Clin. Oncol. 19(4): 1088-1095). Methods of employing cisplatin clinically are well known in the art. For example, cisplatin has been administered in a single day over a six hour period, once per month, by slow intravenous infusion. For localized lesions, cisplatin can be administered by local injection. Intraperitoneal infusion can also be employed. Cisplatin can be administered in doses as low as 10 mg/m² per treatment if part of a multi-drug regimen, or if the patient has an adverse reaction to higher dosing. In general, a clinical dose is from about 30 to about 120 or 150 mg/m² per treatment.

[0442] Typically, platinum-containing chemotherapeutic agents are administered parenterally, for example by slow intravenous infusion, or by local injection, as discussed above. The effects of intralesional (intra-tumoral) and IP administration of cisplatin is described in (Nagase et al. (1987) Cancer Treat. Rep. 71(9): 825-829; and Theon et al. (1993) J. Am. Vet. Med. Assoc. 202(2): 261-267).

[0443] In one exemplary example, the virus is administered once, 2-6 times or more with 0-60 days apart each administration, followed by 1-30 days where no anti-cancer treatment, then cisplatin is administered daily for 1-5 days, followed by 1-30 days where no anti-cancer treatment is administered. Each component of the therapy, virus or cisplatin treatment, or the virus and cisplatin combination therapy can be repeated. In another exemplary example, cisplatin is administered daily for 1 to 5 days, followed by 1-10 days where no anti-cancer treatment is administered, then the virus is administered once or 2-6 times with 0-60 days apart. Such treatment scheme can be repeated. In another exemplary example, cisplatin is administered daily for 1 to 5 days, followed by 1-10 days where no anti-cancer treatment is administered, then the virus is administered once or 2-6 times with 0-60 days apart. This is followed by 5-60 days where no anti-cancer treatment is administered, then cisplatin is administered again for 1-5 days. Such treatment scheme can be repeated.

[0444] Gemcitabine (GEMZAR®) is another compound employed in the therapy of breast cancer, non-small cell lung cancer, and pancreatic cancer. Gemcitabine is a nucleoside analogue that exhibits antitumor activity. Methods of employing gemcitabine clinically are well known in the art. For example, gemcitabine has been administered by intravenous infusion at a dose of 1000 mg/m² over 30 minutes once weekly for up to 7 weeks (or until toxicity necessitates reducing or holding a dose), followed by a week of rest from treatment of pancreatic cancer. Subsequent cycles can include infusions once weekly for 3 consecutive weeks out of every 4 weeks. Gemcitabine has also been employed in combination with cisplatin in cancer therapy.

[0445] In one exemplary example, the virus is administered once or 2-6 times with 0-60 days apart, followed by 1-30 days where no anti-cancer treatment is administered, then gemcitabine is administered 1-7 times with 0-30 days apart, followed by 1-30 days where no anti-cancer treatment is administered. Such treatment scheme can be repeated. In another exemplary example, gemcitabine is administered 1-7 times with 0-30 days apart, followed by 1-10 days where no anti-cancer treatment is administered, then the virus is administered once or 2-6 times with 0-60 days apart. This is followed by 5-60 days where no anti-cancer treatment is administered. Such treatment scheme can be repeated. In another exemplary example, gemcitabine is administered 1-7 times with 0-30 days apart, followed by 1-10 days where no anti-cancer treatment is administered, then the virus is administered once or 2-6 times with 0-60 days apart. This is followed by 5-60 days where no anti-cancer treatment is administered, then gemcitabine is administered again for 1-7 times with 0-30 days apart. Such treatment scheme can be repeated.

[0446] As will be understood by one of skill in the art, the optimal treatment regimen will vary and it is within the scope of the treatment methods to evaluate the status of the disease under treatment and the general health of the patient prior to, and following one or more cycles of combination therapy in order to determine the optimal therapeutic combination.

[0447] iii. Immunotherapies and Biological Therapies

[0448] Therapeutic compounds also include, but are not limited to, compounds that exert an immunotherapeutic effect, stimulate or suppress the immune system, carry a therapeutic compound, or a combination thereof. Optionally, the therapeutic agent can exhibit or manifest additional properties, such as, properties that permit its use as an imaging agent, as described elsewhere herein. Such therapeutic compounds include, but are not limited to, anti-cancer antibodies, radiation therapy, siRNA molecules and compounds that suppress the immune system (i.e. immunosuppressors, immunosuppressive agents). In some cases, it is desirable to administer an immunosuppressive agent to a subject to suppress the immune system prior to the administration of the virus in order to minimize any adverse reactions to the virus. Exemplary immunosuppressive agents include, but are not limited to, glucocorticoids, alkylating agents, antimetabolites, interferons and immunosuppressive antibodies (e.g., anti-CD3 and anti-IL2 receptor antibodies).

[0449] Immunotherapy also includes for example, immune-stimulating molecules (protein-based or non-protein-based), cells and antibodies. Immunotherapy treatments can include stimulating immune cells to act more effectively or to make the tumor cells or tumor associated antigens recognizable to the immune system (i.e., break tolerance).

[0450] Cytokines and growth factors include, but are not limited to, interleukins, such as, for example, interleukin-1, interleukin-2, interleukin-6 and interleukin-12, tumor necrosis factors, such as tumor necrosis factor alpha (TNF-α), interferons such as interferon gamma (IFN-γ), granulocyte macrophage colony stimulating factors (GM-CSF), angiogenins, and tissue factors.

[0451] Anti-cancer antibodies include, but are not limited to, ADEPT, Trastuzumab (Herceptin®), Tositumomab (Bexxar®), Cetuximab (Erbitux®), Ibritumomab (Zevalin®), Alemtuzumab (Campath-1H, Campath®), Epratuzumab (LymphoCide), Gemtuzumab ozogamicin (Mylotarg®), Bevacimab (Avastin®), Tarceva® (Erlotinib), SUTENT® (sunitinib malate), Panorex™ (Edrecolomab), Rituxan® (Rituximab), Zevalin® (90Y-ibritumomab tiuxetan) and Mylotarg® (Gemtuzumab Ozogamicin).

[0452] Thus, provided herein are methods of administering to a subject one or more therapeutic compounds that can act in conjunction with the virus to stimulate or enhance the immune system, thereby enhancing the effect of the virus. Such immunotherapy can be either delivered as a separate therapeutic modality or could be encoded (if the immunotherapy is protein-based) by the administered virus.

[0453] Biological therapies are treatments that use natural body substances or drugs made from natural body substances. They can help to treat a cancer and control side effects caused by other cancer treatments such as chemotherapy. Biological therapies are also sometimes called Biological Response Modifiers (BRMs), biologic agents or simply “biologics” because they stimulate the body to respond biologically (or naturally) to cancer. Immunotherapy is treatment using natural substances that the body uses to fight infection and disease. Because it uses natural substances, immunotherapy is also a biological therapy. There are several types of drugs that come under the term biological therapy: these include, for example, monoclonal antibodies (mAbs), cancer vaccines, growth factors for blood cells, cancer growth inhibitors, anti-angiogenic factors, interferon alpha, interleukin-2 (IL-2), gene therapy and BCG vaccine for bladder cancer

[0454] Monoclonal antibodies (mAbs) are of particular interest for treating cancer because of the specificity of binding to a unique antigen and the ability to produce large quantities in the laboratory for mass distribution. Monoclonal antibodies can be engineered to act in the same way as immune system proteins: that is, to seek out and kill foreign matter in your body, such as viruses. Monoclonal antibodies can be designed to recognize epitopes on the surface of cancer cells. The antibodies target specifically bind to the epitopes and either kill the cancer cells or deliver a therapeutic agent to the cancer cell. Methods of conjugating therapeutic agents to antibodies is well-known in the art. Different antibodies have to be made for different types of cancer; for example, rituximab recognizes CD20 protein on the outside of non Hodgkin's lymphoma cells; ADEPT is a treatment using antibodies that recognize bowel (colon) cancer; and Trastuzumab (Herceptin®) recognizes breast cancer cells that produce too much of the protein HER 2 (“HER 2 positive”). Other antibodies include, for example, Tositumomab (Bexxar®), Cetuximab (Erbitux®), Ibritumomab (Zevalin®), Alemtuzumab (Campath-1H), Epratuzumab (LymphoCide), Gemtuzumab ozogamicin (Mylotarg®) and Bevacimab (Avastin®). Thus, the viruses provided herein can be administered concurrently with, or sequentially to, one or more monoclonal antibodies in the treatment of cancer. In one example, additional therapy is administered in the form of one or more of any of the other treatment modalities provided herein.

[0455] Rather than attempting to prevent infection, such as is the case with the influenza virus, cancer vaccines help treat the cancer once it has developed. The aim of cancer vaccines is to stimulate the immune response. Cancer vaccines include, for example, antigen vaccines, whole cell vaccines, dendritic cell vaccines, DNA vaccines and anti-idiotype vaccines. Antigen vaccines are vaccines made from tumor-associated antigens in, or produced by, cancer cells. Antigen vaccines stimulate a subject's immune system to attack the cancer. Whole cell vaccines are vaccines that use the whole cancer cell, not just a specific antigen from it, to make the vaccine. The vaccine is made from a subject's own cancer cells, another subject's cancer cells or cancer cells grown in a laboratory. The cells are treated in the laboratory, usually with radiation, so that they can't grow, and are administered to the subject via injection or through an intravenous drip into the bloodstream so they can stimulate the immune system to attack the cancer. One type of whole cell vaccine is a dendritic cell vaccine, which help the immune system to recognize and attack abnormal cells, such as cancer cells. Dendritic cell vaccines are made by growing dendritic cells alongside the cancer cells in the lab. The vaccine is administered to stimulate the immune system to attack the cancer. Anti-idiotype vaccines are vaccines that stimulate the body to make antibodies against cancer cells. Cancer cells make some tumor-associated antigens that the immune system recognizes as foreign. But because cancer cells are similar to non-cancer cells, the immune system can respond weakly. DNA vaccines boost the immune response. DNA vaccines are made from DNA from cancer cells that carry the genes for the tumor-associated antigens. When a DNA vaccine is injected, it enables the cells of the immune system to recognize the tumor-associated antigens, and activates the cells in the immune system (i.e., breaking tolerance). The most promising results from using DNA vaccines are in treating melanoma. Thus, the viruses provided herein can be administered concurrently with, or sequentially to, a whole cell vaccine in the treatment of cancer. In one example, additional therapy is administered in the form of one or more of any of the other treatment modalities provided herein.

[0456] Growth factors are natural substances that stimulate the bone marrow to make blood cells. Recombinant technology can be used to generate growth factors which can be administered to a subject to increase the number of white blood cells, red blood cells and stem cells in the blood. Growth factors used in cancer treatment to boost white blood cells include Granulocyte Colony Stimulating Factor (G-CSF) also called filgrastim (Neupogen) or lenograstim (Granocyte) and Granulocyte and Macrophage Colony Stimulating Factor (GM-CSF), also called molgramostim. A growth factor to help treat anemia is erythropoietin (EPO). EPO encourages the body to make more red blood cells, which in turn, increases hemoglobin levels and the levels of oxygen in body tissues. Other growth factors are being developed which can boost platelets. Thus, the viruses provided herein can be administered concurrently with, or sequentially to, a growth factor such as GM-CSF, in the treatment of cancer. In one example, additional therapy is administered in the form of one or more of any of the other treatment modalities provided herein.

[0457] Cancer growth inhibitors use cell-signaling molecules which control the growth and multiplication of cells, such as cancer cells. Drugs that block these signaling molecules can stop cancers from growing and dividing. Cancer growth factors include, but are not limited to, tyrosine kinases. Thus, drugs that block tyrosine kinases are tyrosine kinase inhibitors (TKIs). Examples of TKIs include, but are not limited to, Erlotinib (Tarceva®, OSI-774), Iressa® (Gefitinib, ZD 1839) and Imatinib (Gleevec®, STI 571). Another type of growth inhibitor is Bortezomib (Velcade®) for multiple myeloma and for some other cancers. Velcade is a proteasome inhibitor. Proteasomes are found in all cells and help break down proteins in cells. Interfering with the action of proteasomes causes a buildup of proteins in the cell to toxic levels; thereby killing the cancer cells. Cancer cells are more sensitive to Velcade than normal cells. Thus, the viruses provided herein can be administered concurrently with, or sequentially to, a cancer growth inhibitor, such as Velcade, in the treatment of cancer. In one example, additional therapy is administered in the form of one or more of any of the other treatment modalities provided herein.

[0458] Cancers need a blood supply to expand and grow their own blood vessels as they get bigger. Without its own blood supply, a cancer cannot grow due to lack of nutrients and oxygen. Anti-angiogenic drugs stop tumors from developing their own blood vessels. Examples of these types of drugs include, but are not limited to, Thalidomide, mainly for treating myeloma but also in trials for other types of cancer, and Bevacizumab (Avastin), a type of monoclonal antibody that has been investigated for bowel cancer. Thus, the viruses provided herein can be administered concurrently with, or sequentially to, an anti-angiogenic drug in the treatment of cancer. In one example, additional therapy is administered in the form of one or more of any of the other treatment modalities provided herein.

[0459] Interferon-alpha (IFN-α) is a natural substance produced in the body, in very small amounts, as part of the immune response. IFN-α is administered as a treatment to boost the immune system and help fight cancers such as renal cell (kidney) cancer, malignant melanoma, multiple myeloma and some types of leukemias. IFN-α works in several ways: it can help to stop cancer cells growing, it can also boost the immune system to help it attack the cancer, and it can affect the blood supply to the cancer cells. Thus, the viruses provided herein can be administered concurrently with, or sequentially to, IFN-α in the treatment of cancer. In one example, additional therapy is administered in the form of one or more of any of the other treatment modalities provided herein.

[0460] Administration of IL-2 is a biological therapy drug because it is naturally produced by the immune system. Thus, it is also an immunotherapy. Interleukin 2 is used in treating renal cell (kidney) cancer, and is being tested in clinical trials for several other types of cancers. IL-2 works directly on cancer cells by interfering with cell grow and proliferation; it stimulates the immune system by promoting the growth of killer T cells and other cells that attack cancer cells; and it also stimulates cancer cells to secrete chemoattractants that attract immune system cells. IL-2 is generally administered as a subcutaneous injection just under the skin once daily for 5 days, followed by 2 days rest. The cycle of injections is repeated for 4 weeks followed by a week without treatment. The treatment regimen and the number of cycles administered depends on the type of cancer and how it responds to the treatment. IL-2 can be self-administered or administered by a health professional. Alternatively, IL-2 can be administered intravenously via injection or drip. Thus, the viruses provided herein can be administered concurrently with, or sequentially to, IL-2 in the treatment of cancer. In one example, additional therapy is administered in the form of one or more of any of the other treatment modalities provided herein.

[0461] Gene therapy involves treating cancer by blocking abnormal genes in cancer cells, repairing or replacing abnormal genes in cancer cells, encouraging even more genes to become abnormal in cancer cells so that they die or become sensitive to treatment, using viruses to carry treatment-activating enzymes into the cancer cells, or a combination thereof. As a result, cancer cells die due to damage in the cell. Cancer cells develop as a result of several types of mutations in several of their genes. Targeted genes include, but are not limited to, those that encourage the cell to multiply (i.e., oncogenes), genes that stop the cell from multiplying (i.e., tumor suppressor genes) and genes that repair other damaged genes. Gene therapy can involve repair of damaged oncogenes or blocking the proteins that the oncogenes produce. The tumor suppressor gene, p53, is damaged in many human cancers. Viruses have been used to deliver an undamaged p53 gene into cancer cells, and early clinical trials are now in progress looking at treating cancers with modified p53-producing viruses. Gene therapy could be used to replace the damaged DNA repairing genes. In an alternative example, methods of increasing DNA damage within a tumor cell can promote death of the tumor cell or cause increased susceptibility of the tumor cell to other cancer treatments, such as radiotherapy or chemotherapy. Thus, the viruses provided herein can be administered concurrently with, or sequentially to, any of the gene therapy methods provided herein or known in the art in the treatment of cancer. In one example, additional therapy is administered in the form of one or more of any of the other treatment modalities provided herein.

[0462] Treatment of early stage bladder cancer is called intravesical treatment, which is mainly used to treat stage T1 bladder cancers that are high grade (grade 3 or G3) or carcinoma in situ of the bladder (also known as T is or CIS). BCG is a vaccine for tuberculosis (TB), which also has been found to be effective in treating CIS and preventing bladder cancers from recurring. In some cases, BCG vaccines have been used for treating grade 2 early bladder cancer. Because bladder cancer can occur anywhere in the bladder lining, it cannot be removed in the same way as the papillary early bladder cancers. Rather a BCG vaccine is administered using intravesical therapy; that is, first, a catheter (tube) put is inserted into the bladder, followed by intra-catheter administration of a BCG vaccine and/or a chemotherapy. BCG treatment occurs weekly for 6 weeks or more depending on the effect on the bladder cancer. BCG treatment of bladder cancer can be combined with other types of treatments, such as administration of chemotherapy (intravesical), IL-2, treatment with drugs that make cells sensitive to light, vitamins, and photodynamic therapy. Thus, the viruses provided herein can be administered concurrently with, or sequentially to, BCG vaccines in the treatment of cancer. In one example, additional therapy is administered in the form of one or more of any of the other treatment modalities provided herein.

[0463] e. State of Subject

[0464] In another example, the methods provided herein for administering an antibiotic and virus to a subject can be performed on a subject in any of a variety of states, including an anesthetized subject, an alert subject, a subject with elevated body temperature, a subject with reduced body temperature, or other state of the subject that is known to affect the accumulation of a virus in the tumor. As provided herein, it has been determined that a subject that is anesthetized can have a decreased rate of accumulation of a virus in a tumor relative to a subject that is not anesthetized. Further provided herein, it has been determined that a subject with decreased body temperature can have a decreased rate of accumulation of a virus in a tumor relative to a subject with a normal body temperature. Accordingly, provided herein are methods of administering an antibiotic and a virus to a subject, where the methods can include administering an antibiotic and a virus to a subject where the subject is not under anesthesia, such as general anesthesia; for example, the subject can be under local anesthesia, or can be anaesthetized. Also provided herein are methods of administering an antibiotic and a virus to a subject, where the methods can include administering a virus to a subject with altered body temperature, where the alteration of the body temperature can influence the ability of the virus to accumulate in a tumor; typically, a decrease in body temperature can decrease the ability of a virus to accumulate in a tumor. Thus, in one exemplary example, a method is provided for administering a virus to a subject, where the method includes elevating the body temperature of the subject to a temperature above normal, and administering a virus to the subject, where the virus can accumulate in the tumor more readily in the subject with higher body temperature relative to the ability of the virus to accumulate in a tumor of a subject with a normal body temperature. In another example, localized elevations in temperature in the area surrounding the tumor can be used to increase the accumulation of the virus in the tumor.

[0465] 4. Monitoring Oncolytic Viral Therapy

[0466] The methods provided herein can further include one or more steps of monitoring the subject, monitoring the tumor, and/or monitoring the virus administered to the subject. Any of a variety of monitoring steps can be included in the methods provided herein, including, but not limited to, monitoring tumor size, monitoring anti-(tumor antigen) antibody titer, monitoring the presence and/or size of metastases, monitoring the subject's lymph nodes, monitoring the subject's weight or other health indicators including blood or urine markers, monitoring anti-(viral antigen) antibody titer, monitoring viral expression of a detectable gene product, and directly monitoring viral titer in a tumor, tissue or organ of a subject.

[0467] The purpose of the monitoring can be simply for assessing the health state of the subject or the progress of therapeutic treatment of the subject, or can be for determining whether or not further administration of the same or a different virus is warranted, or for determining when or whether or not to administer a compound to the subject where the compound can act to increase the efficacy of the therapeutic method, or the compound can act to decrease the pathogenicity of the virus administered to the subject.

[0468] a. Monitoring Viral Gene Expression

[0469] In some examples, the methods provided herein can include monitoring one or more virally expressed genes. Viruses can express one or more detectable gene products, including but not limited to, detectable proteins (e.g. luminescent or fluorescent proteins) or proteins that induce a detectable signal (e.g. proteins that bind or transport detectable compounds or modify substrates to produce a signal). The infected cells/tissue can thus be imaged by one more optical or non-optical imaging methods.

[0470] As provided herein, measurement of a detectable gene product expressed by a virus can provide an accurate determination of the level of virus present in the subject. As further provided herein, measurement of the location of the detectable gene product, for example, by imaging methods including, but not limited to, magnetic resonance, fluorescence, and tomographic methods, can determine the localization of the virus in the subject. Accordingly, the methods provided herein that include monitoring a detectable viral gene product can be used to determine the presence or absence of the virus in one or more organs or tissues of a subject, and/or the presence or absence of the virus in a tumor or metastases of a subject. Further, the methods provided herein that include monitoring a detectable viral gene product can be used to determine the titer of virus present in one or more organs, tissues, tumors or metastases. Methods that include monitoring the localization and/or titer of viruses in a subject can be used for determining the pathogenicity of a virus; since viral infection, and particularly the level of infection, of normal tissues and organs can indicate the pathogenicity of the probe, methods of monitoring the localization and/or amount of viruses in a subject can be used to determine the pathogenicity of a virus. Since methods provided herein can be used to monitor the amount of viruses at any particular location in a subject, the methods that include monitoring the localization and/or titer of viruses in a subject can be performed at multiple time points, and, accordingly can determine the rate of viral replication in a subject, including the rate of viral replication in one or more organs or tissues of a subject; accordingly, the methods of monitoring a viral gene product can be used for determining the replication competence of a virus. The methods provided herein also can be used to quantitate the amount of virus present in a variety of organs or tissues, and tumors or metastases, and can thereby indicate the degree of preferential accumulation of the virus in a subject; accordingly, the viral gene product monitoring methods provided herein can be used in methods of determining the ability of a virus to accumulate in tumor or metastases in preference to normal tissues or organs. Since the viruses used in the methods provided herein can accumulate in an entire tumor or can accumulate at multiple sites in a tumor, and can also accumulate in metastases, the methods provided herein for monitoring a viral gene product can be used to determine the size of a tumor or the number of metastases that are present in a subject. Monitoring such presence of viral gene product in tumor or metastasis over a range of time can be used to assess changes in the tumor or metastasis, including growth or shrinking of a tumor, or development of new metastases or disappearance of metastases, and also can be used to determine the rate of growth or shrinking of a tumor, or development of new metastases or disappearance of metastases, or the change in the rate of growth or shrinking of a tumor, or development of new metastases or disappearance of metastases. Accordingly, the methods of monitoring a viral gene product can be used for monitoring a neoplastic disease in a subject, or for determining the efficacy of treatment of a neoplastic disease, by determining rate of growth or shrinking of a tumor, or development of new metastases or disappearance of metastases, or the change in the rate of growth or shrinking of a tumor, or development of new metastases or disappearance of metastases.

[0471] Any of a variety of detectable proteins can be detected in the monitoring methods provided herein; an exemplary, non-limiting list of such detectable proteins includes any of a variety of fluorescent proteins (e.g., green or red fluorescent proteins), any of a variety of luciferases, transferrin or other iron binding proteins; or receptors, binding proteins, and antibodies, where a compound that specifically binds the receptor, binding protein or antibody can be a detectable agent or can be labeled with a detectable substance (e.g., a radionuclide or imaging agent); or transporter proteins (e.g. hNET or hNIS) that can bind to and transport detectable molecules into the cell. Viruses expressing a detectable protein can be detected by a combination of the method provided herein and know in the art. Viruses expressing more than one detectable protein or two or more viruses expressing various detectable protein can be detected and distinguished by dual imaging methods. For example, a virus expressing a fluorescent protein and an iron binding protein can be detected in vitro or in vivo by low light fluorescence imaging and magnetic resonance, respectively. In another example, a virus expressing two or more fluorescent proteins can be detected by fluorescence imaging at different wavelength. In vivo dual imaging can be performed on a subject that has been administered a virus expressing two or more detectable gene products or two or more viruses each expressing one or more detectable gene products.

[0472] b. Monitoring Tumor Size

[0473] Also provided herein are methods of monitoring tumor and/or metastasis size and location. Tumor and or metastasis size can be monitored by any of a variety of methods known in the art, including external assessment methods or tomographic or magnetic imaging methods. In addition to the methods known in the art, methods provided herein, for example, monitoring viral gene expression, can be used for monitoring tumor and/or metastasis size.

[0474] Monitoring size over several time points can provide information regarding the increase or decrease in size of a tumor or metastasis, and can also provide information regarding the presence of additional tumors and/or metastases in the subject. Monitoring tumor size over several time points can provide information regarding the development of a neoplastic disease in a subject, including the efficacy of treatment of a neoplastic disease in a subject.

[0475] c. Monitoring Antibody Titer

[0476] The methods provided herein also can include monitoring the antibody titer in a subject, including antibodies produced in response to administration of a virus to a subject. The viruses administered in the methods provided herein can elicit an immune response to endogenous viral antigens. The viruses administered in the methods provided herein also can elicit an immune response to exogenous genes expressed by a virus. The viruses administered in the methods provided herein also can elicit an immune response to tumor antigens. Monitoring antibody titer against viral antigens, viral expressed exogenous gene products, or tumor antigens can be used in methods of monitoring the toxicity of a virus, monitoring the efficacy of treatment methods, or monitoring the level of gene product or antibodies for production and/or harvesting.

[0477] In one example, monitoring antibody titer can be used to monitor the toxicity of a virus. Antibody titer against a virus can vary over the time period after administration of the virus to the subject, where at some particular time points, a low anti-(viral antigen) antibody titer can indicate a higher toxicity, while at other time points a high anti-(viral antigen) antibody titer can indicate a higher toxicity. The viruses used in the methods provided herein can be immunogenic, and can, therefore, elicit an immune response soon after administering the virus to the subject. Generally, a virus against which a subject's immune system can quickly mount a strong immune response can be a virus that has low toxicity when the subject's immune system can remove the virus from all normal organs or tissues. Thus, in some examples, a high antibody titer against viral antigens soon after administering the virus to a subject can indicate low toxicity of a virus. In contrast, a virus that is not highly immunogenic can infect a host organism without eliciting a strong immune response, which can result in a higher toxicity of the virus to the host. Accordingly, in some examples, a high antibody titer against viral antigens soon after administering the virus to a subject can indicate low toxicity of a virus.

[0478] In other examples, monitoring antibody titer can be used to monitor the efficacy of treatment methods. In the methods provided herein, antibody titer, such as anti-(tumor antigen) antibody titer, can indicate the efficacy of a therapeutic method such as a therapeutic method to treat neoplastic disease. Therapeutic methods provided herein can include causing or enhancing an immune response against a tumor and/or metastasis. Thus, by monitoring the anti-(tumor antigen) antibody titer, it is possible to monitor the efficacy of a therapeutic method in causing or enhancing an immune response against a tumor and/or metastasis. The therapeutic methods provided herein also can include administering to a subject a virus that can accumulate in a tumor and can cause or enhance an anti-tumor immune response. Accordingly, it is possible to monitor the ability of a host to mount an immune response against viruses accumulated in a tumor or metastasis, which can indicate that a subject has also mounted an anti-tumor immune response, or can indicate that a subject is likely to mount an anti-tumor immune response, or can indicate that a subject is capable of mounting an anti-tumor immune response.

[0479] In other examples, monitoring antibody titer can be used for monitoring the level of gene product or antibodies for production and/or harvesting. As provided herein, methods can be used for producing proteins, RNA molecules or other compounds by expressing an exogenous gene in a virus that has accumulated in a tumor. Further provided herein are methods for producing antibodies against a protein, RNA molecule or other compound produced by exogenous gene expression of a virus that has accumulated in a tumor. Monitoring antibody titer against the protein, RNA molecule or other compound can indicate the level of production of the protein, RNA molecule or other compound by the tumor-accumulated virus, and also can directly indicate the level of antibodies specific for such a protein, RNA molecule or other compound.

[0480] d. Monitoring General Health Diagnostics

[0481] The methods provided herein also can include methods of monitoring the health of a subject. Some of the methods provided herein are therapeutic methods, including neoplastic disease therapeutic methods. Monitoring the health of a subject can be used to determine the efficacy of the therapeutic method, as is known in the art. The methods provided herein also can include a step of administering to a subject a virus. Monitoring the health of a subject can be used to determine the pathogenicity of a virus administered to a subject. Any of a variety of health diagnostic methods for monitoring disease such as neoplastic disease, infectious disease, or immune-related disease can be monitored, as is known in the art. For example, the weight, blood pressure, pulse, breathing, color, temperature or other observable state of a subject can indicate the health of a subject. In addition, the presence or absence or level of one or more components in a sample from a subject can indicate the health of a subject. Typical samples can include blood and urine samples, where the presence or absence or level of one or more components can be determined by performing, for example, a blood panel or a urine panel diagnostic test. Exemplary components indicative of a subject's health include, but are not limited to, white blood cell count, hematocrit, or reactive protein concentration.

[0482] e. Monitoring Coordinated with Treatment

[0483] Also provided herein are methods of monitoring a therapy, where therapeutic decisions can be based on the results of the monitoring. Therapeutic methods provided herein can include administering to a subject a virus, where the virus can preferentially accumulate in a tumor and/or metastasis, and where the virus can cause or enhance an anti-tumor immune response. Such therapeutic methods can include a variety of steps including multiple administrations of a particular virus, administration of a second virus, or administration of a therapeutic compound. Determination of the amount, timing or type of virus or compound to administer to the subject can be based on one or more results from monitoring the subject. For example, the antibody titer in a subject can be used to determine whether or not it is desirable to administer a virus or compound, the quantity of virus or compound to administer, and the type of virus or compound to administer, where, for example, a low antibody titer can indicate the desirability of administering additional virus, a different virus, or a therapeutic compound such as a compound that induces viral gene expression. In another example, the overall health state of a subject can be used to determine whether or not it is desirable to administer a virus or compound, the quantity of virus or compound to administer, and the type of virus or compound to administer, where, for example, determining that the subject is healthy can indicate the desirability of administering additional virus, a different virus, or a therapeutic compound such as a compound that induces viral gene expression. In another example, monitoring a detectable virally expressed gene product can be used to determine whether or not it is desirable to administer a virus or compound, the quantity of virus or compound to administer, and the type of virus or compound to administer. Such monitoring methods can be used to determine whether or not the therapeutic method is effective, whether or not the therapeutic method is pathogenic to the subject, whether or not the virus has accumulated in a tumor or metastasis, and whether or not the virus has accumulated in normal tissues or organs. Based on such determinations, the desirability and form of further therapeutic methods can be derived.

[0484] In one example, determination of whether or not a therapeutic method is effective can be used to derive further therapeutic methods. Any of a variety of methods of monitoring can be used to determine whether or not a therapeutic method is effective, as provided herein or otherwise known in the art. If monitoring methods indicate that the therapeutic method is effective, a decision can be made to maintain the current course of therapy, which can include further administrations of a virus or compound, or a decision can be made that no further administrations are required. If monitoring methods indicate that the therapeutic method is ineffective, the monitoring results can indicate whether or not a course of treatment should be discontinued (e.g., when a virus is pathogenic to the subject), or changed (e.g., when a virus accumulates in a tumor without harming the host organism, but without eliciting an anti-tumor immune response), or increased in frequency or amount (e.g., when little or no virus accumulates in tumor).

[0485] In one example, monitoring can indicate that a virus is pathogenic to a subject. In such instances, a decision can be made to terminate administration of the virus to the subject, to administer lower levels of the virus to the subject, to administer a different virus to a subject, or to administer to a subject a compound that reduces the pathogenicity of the virus. In one example, administration of a virus that is determined to be pathogenic can be terminated. In another example, the dosage amount of a virus that is determined to be pathogenic can be decreased for subsequent administration; in one version of such an example, the subject can be pre-treated with another virus that can increase the ability of the pathogenic virus to accumulate in tumor, prior to re-administering the pathogenic virus to the subject. In another example, a subject can have administered thereto a virus that is pathogenic to the subject; administration of such a pathogenic virus can be accompanied by administration of, for example, an antiviral compound (e.g., cidofovir), pathogenicity attenuating compound (e.g., a compound that down-regulates the expression of a lytic or apoptotic gene product), or other compound that can decrease the proliferation, toxicity, or cell killing properties of a virus, as described herein elsewhere. In one variation of such an example, the localization of the virus can be monitored, and, upon determination that the virus is accumulated in tumor and/or metastases but not in normal tissues or organs, administration of the antiviral compound or pathogenicity attenuating compound can be terminated, and the pathogenic activity of the virus can be activated or increased, but limited to the tumor and/or metastasis. In another variation of such an example, after terminating administration of the antiviral compound or pathogenicity attenuating compound, the presence of the virus and/or pathogenicity of the virus can be further monitored, and administration of such a compound can be reinitiated if the virus is determined to pose a threat to the host by, for example, spreading to normal organs or tissues, releasing a toxin into the vasculature, or otherwise having pathogenic effects reaching beyond the tumor or metastasis.

[0486] In another example, monitoring can determine whether or not a virus has accumulated in a tumor or metastasis of a subject. Upon such a determination, a decision can be made to further administer additional virus, a different virus or a compound to the subject. In another example, monitoring the presence of a virus in a tumor can be used in deciding to administer to the subject a compound, where the compound can increase the pathogenicity, proliferation, or immunogenicity of a virus or the compound can otherwise act in conjunction with the virus to increase the proliferation, toxicity, tumor cell killing, or immune response eliciting properties of a virus; in one variation of such an example, the virus can, for example, have little or no lytic or cell killing capability in the absence of such a compound; in a further variation of such an example, monitoring of the presence of the virus in a tumor or metastasis can be coupled with monitoring the absence of the virus in normal tissues or organs, where the compound is administered if the virus is present in tumor or metastasis and not at all present or substantially not present in normal organs or tissues; in a further variation of such an example, the amount of virus in a tumor or metastasis can be monitored, where the compound is administered if the virus is present in tumor or metastasis at sufficient levels.

### F. EXAMPLES

[0487] The following examples are included for illustrative purposes only and are not intended to limit the scope of the invention.

### Example 1

### Exemplary Vaccinia Viruses

### A. GLV-1h68

[0488] The attenuated vaccinia virus strain GLV-1h68 (SEQ ID NO:1) was purified as previously described (Zhang et al., (2007) Cancer Res 67:10038-10046). This genetically engineered strain, which has been described in U.S. Pat. No. 7,588,767, contains DNA insertions in the F14.5L, thymidine kinase (TK) and hemagglutinin (HA) genes. GLV-1h68 was prepared from the vaccinia virus strain designated LIVP (a vaccinia virus strain, originally derived by adapting the vaccinia Lister strain (ATCC Catalog No. VR-1549) to calf skin (Research Institute of Viral Preparations, Moscow, Russia, Al'tshtein et al. (1983) Dokl. Akad. Nauk USSR 285:696-699). The LIVP strain, whose genome sequence is set forth in SEQ ID NO:2 and from which GLV-1h68 was generated, contains a mutation in the coding sequence of the TK gene, in which a substitution of a guanine nucleotide with a thymidine nucleotide (nucleotide position 80207 of SEQ ID NO:2) introduces a premature STOP codon within the coding sequence.

[0489] GLV-1h68 is a recombinant, replication-competent vaccinia virus derived from the vaccinia virus LIVP strain (Lister strain from the Institute of Viral Preparations, Moscow, Russia). As described in U.S. Pat. No. 7,588,767 (see Example 1), GLV-1h68 was generated by inserting expression cassettes encoding detectable marker proteins into the F14.5L (also designated in LIVP as F3) gene, thymidine kinase (TK) gene, and hemagglutinin (HA) gene loci of the vaccinia virus LIVP strain. Specifically, an expression cassette containing a Ruc-GFP cDNA molecule (a fusion of DNA encoding Renilla luciferase and DNA encoding GFP; SEQ ID NO:38 (DNA); SEQ ID NO:39 (protein)) under the control of a vaccinia synthetic early/late promoter P_{SEL} ((P_{SEL})Ruc-GFP) was inserted into the F14.5L gene; an expression cassette containing DNA encoding beta-galactosidase under the control of the vaccinia early/late promoter P_{7.5k} ((P_{7.5k})LacZ) and DNA encoding a rat transferrin receptor positioned in the reverse orientation for transcription relative to the vaccinia synthetic early/late promoter P_{SEL} ((P_{SEL})rTrfR) was inserted into the TK gene (the resulting virus does not express transferrin receptor protein since the DNA encoding the protein is positioned in the reverse orientation for transcription relative to the promoter in the cassette); and an expression cassette containing DNA encoding β-glucuronidase under the control of the vaccinia late promoter P₁₁ₖ ((P₁₁ₖ)gusA) was inserted into the HA gene. The genome of GLV-1h68 has the sequence of nucleotides set forth in SEQ ID NO:1. Insertion of the expression cassettes into the LIVP genome to generate the GLV-1h68 strain resulted in disruption of the coding sequences for each of the F14.5L, TK and HA genes; accordingly, all three genes in the resulting strains are nonfunctional in that they do not encode the corresponding full-length proteins.

[0490] Virus was propagated in CV-1 cells, and up to 7×10⁹ plaque-forming unit (pfu)/mL of GLV-1h68 can be purified from 2×10⁸ infected CV-1 cells through sucrose gradients (Joklik WK (1962) Virology 18:9-18).

### B. Modified Vaccinia Viruses

[0491] Modified recombinant vaccinia viruses containing heterologous DNA inserted into one or more loci of the vaccinia virus genome were generated via homologous recombination between DNA sequences in the GLV-1h68 genome and a transfer vector using methods described herein and known to those of skill in the art (see, e.g., Falkner and Moss (1990) J. Virol. 64:3108-3111; Chakrabarti et al. (1985) Mol. Cell. Biol. 5:3403-3409; and U.S. Pat. No. 4,722,848). In these methods, the existing target gene in the starting vaccinia virus genome is replaced by an interrupted copy of the gene contained in the transfer vector through two crossover events: a first crossover event of homologous recombination between the vaccinia virus genome and the transfer vector and a second crossover event of homologous recombination between direct repeats within the target locus. The interrupted version of the target gene that is in the transfer vector contains the insertion DNA flanked on each side by DNA corresponding to the left portion of the target gene and right portion of the target gene, respectively. The transfer vector also contains a dominant selection marker, e.g., the E. coli guanine phosphoribosyltransferase (gpt) gene, under the control of a vaccinia virus early promoter (e.g.,P_{7.5kE}). Including such a marker in the vector enables a transient dominant selection process to identify recombinant virus grown under selective pressure that has incorporated the transfer vector within its genome. Because the marker gene is not stably integrated into the genome, it is deleted from the genome in a second crossover event that occurs when selection is removed. Thus, the final recombinant virus contains the interrupted version of the target gene as a disruption of the target loci, but does not retain the selectable marker from the transfer vector.

[0492] Homologous recombination between a transfer vector and a starting vaccinia virus genome occurred upon introduction of the transfer vector into cells that have been infected with the starting vaccinia virus. Viruses included GLV-1h74, GLV-1h96, GLV-1h99, GLV-1h108 and GLV-1h163. The construction of these strains is summarized in Table 6, which lists the modified vaccinia virus strains, including the previously described GLV-1h68, their respective genotypes, and the transfer vectors used to engineer the viruses. Construction of the modified vaccinia viruses and the transfer vectors are described in U.S. Patent Pub. Nos. 2009-0117034 and 2009-0098529.

TABLE 6
Modified Vaccinia Viruses

| Name of | Parental | | |
|---|---|---|---|
| Virus | Virus | Transfer Vector | Genotype |
| GLV-1h70 | GLV-1h68 | pNCVVhaT | F14.5L: (P_{SEL})Ruc-GFP |
| | | | TK: (P_{SEL})rTrfR-(P_{7.5k})LacZ |
| | | | HA: HindIII-BamHI |
| GLV-1h73 | GLV-1h70 | pNCVVf14.5lT | F14.5L: BamHI-HindIII |
| | | | TK: (P_{SEL})rTrfR-(P_{7.5k})LacZ |
| | | | HA: HindIII-BamHI |
| GLV-1h74 | GLV-1h73 | pCR-TKLR- | F14.5L: BamHI-Hind III |
| | | gpt2 | TK: SacI-BamHI |
| | | | HA: HindIII-BamHI |
| GLV-1h96 | GLV-1h68 | FSE-IL-24 | F14.5L: (P_{SEL})IL-24 |
| | | | TK: (P_{SEL})rTrfR-(P_{7.5k})LacZ |
| | | | HA: (P₁₁ₖ)gusA |
| GLV-1h99 | GLV-1h68 | FSE-hNET | F14.5L: (P_{SEL})hNET |
| | | | TK: (P_{SEL})rTrfR-(P_{7.5k})LacZ |
| | | | HA: (P₁₁ₖ)gusA |
| GLV-1h100 | GLV-1h68 | TK-SE-hNET3 | F14.5L: (P_{SEL})Ruc-GFP |
| | | | TK: (P_{SE})hNET |
| | | | HA: (P₁₁ₖ)gusA |
| GLV-1h108 | GLV-1h68 | pCR-TK-SEL- | F14.5L: (P_{SEL})Ruc-GFP |
| | | G6-FLAG | TK: (P_{SEL})G6-FLAG |
| | | | HA: (P₁₁ₖ)gusA |
| GLV-1h163 | GLV- | pHA-PSEL- | F14.5L: (P_{SEL})Ruc-GFP |
| | 1h100 | G6-scAb | TK: (P_{SE})hNET |
| | | | HA: (P_{SEL})G6-scAB |

[0493] Briefly, the strains listed in Table 6 were generated as follows:

[0494] GLV-1h70 was generated by insertion of a short non-coding DNA fragment containing HindIII and BamHI sites into the HA locus of starting strain GLV-1h68 thereby deleting the gusA expression cassette at the HA locus of GLV-1h68. Thus, in strain GLV-1h70, the vaccinia HA gene is interrupted within the coding sequence by a short non-coding DNA fragment.

[0495] GLV-1h73 was generated by insertion of a short non-coding DNA fragment containing BamHI and HindIII sites (SEQ ID NO:29) into the F14.5L locus of GLV-1h70 thereby deleting the Ruc-GFP fusion gene expression cassette at the F14.5L locus of GLV-1h70. Thus, in strain GLV-1h73, the vaccinia HA and F14.5L genes are interrupted within the coding sequence by a short non-coding DNA fragment.

[0496] GLV-1h74 was generated by insertion of a short non-coding DNA fragment containing Sad and BamHI sites (SEQ ID NO:29) into the TK locus of strain GLV-1h73 thereby deleting the LacZ/rTFr expression cassette at the TK locus of GLV-1h73. Thus, in strain GLV-1h74, the vaccinia HA, F14.5L and TK genes are interrupted within the coding sequence by a short non-coding DNA fragment.

[0497] GLV-1h96 was generated by insertion of an expression cassette encoding the IL-24 (SEQ ID NO:27) gene under the control of the vaccinia P_{SE} promoter into the F14.5L locus of starting strain GLV-1h68, thereby deleting the Ruc-GFP fusion gene expression cassette at the F14.5L locus of GLV-1h68. The FSE-IL-24 transfer vector is set forth in SEQ ID NO:30. Thus, in strain GLV-1h96, the vaccinia F14.5L gene is interrupted within the coding sequence by a DNA fragment containing DNA encoding IL-24 operably linked to the vaccinia synthetic early promoter. GLV-1h99 was generated by insertion of an expression cassette encoding the human norepinephrine transporter (hNET; SEQ ID NO:36) gene under the control of the vaccinia P_{SE} promoter into the F14.5L locus of starting strain GLV-1h68, thereby deleting the Ruc-GFP fusion gene expression cassette at the F14.5L locus of starting GLV-1h68. The FSE-hNET transfer vector is set forth in SEQ ID NO:31. Thus, in strain GLV-1h99, the vaccinia F14.5L gene is interrupted within the coding sequence by a DNA fragment containing DNA encoding hNET operably linked to the vaccinia synthetic early promoter.

[0498] GLV-1h100 was generated by insertion of an expression cassette encoding hNET under the control of the vaccinia P_{SE} promoter into the TK locus of starting strain GLV-1h68 thereby deleting the LacZ/rTFr expression cassette at the TK locus of starting GLV-1h68. The TK-SE-hNET3 transfer vector is set forth in SEQ ID NO:32. Thus, in strain GLV-1h100, the vaccinia TK gene is interrupted within the coding sequence by a DNA fragment containing DNA encoding hNET operably linked to the vaccinia synthetic early promoter.

GLV-1h108 was generated by insertion of an expression cassette containing DNA encoding G6-FLAG fusion protein under the control of the vaccinia synthetic early/late promoter (P_{SEL}) into the TK locus of strain GLV-1h68 thereby deleting the LacZ/rTFr expression cassette at the TK locus of GLV-1h68. The pCT-TK-SEL-G6-FLAG transfer vector is set forth in SEQ ID NO:33. Strain GLV-1h108 retains the Ruc-GFP expression cassette at the F14.5L locus and the gusA expression cassette at the HA locus.

[0499] GLV-1h163 was derived from the GLV-1h100 strain (described in above) by replacement of gusA gene (beta-glucuronidase) by the gene encoding G6-scAB protein (GLAF-2; SEQ ID NO:34) into A56R locus. The GLAF-2 gene is under the control of the VACV synthetic early/late (SEL) promoter. In addition, GLV-1h163 carries the human norepinephrine transporter (NET) under the control of the VACV synthetic early (SE) promoter into J2R locus. Thus, in strain GLV-1h163, the vaccinia TK gene is interrupted within the coding sequence by a DNA fragment encoding hNET operably linked to the vaccinia synthetic early promoter and the vaccinia HA gene is interrupted within the coding sequence by a DNA fragment containing DNA encoding the single chain anti-VEGF antibody (G6-scAB; (SEQ ID NO:35)) operably linked to the vaccinia synthetic early/late promoter.

### Example 2

### Xenograft Tumor Models

[0500] Xenograft tumor models, derived from injection of C6 rat glioma cells or A549 human lung cancer cells, were used for the in vivo studies that follow.

### A. C6 Glioma Xenografts

[0501] C6 rat glioma cells (ATCC No. CCL-107, Rockville, Md.) were cultured in RPMI-1640 medium (Cellgro, Mediatech, Inc., Herndon, Va.) supplemented with 10% (v/v) fetal bovine serum (FBS) and 1× penicillin/streptomycin under standard cell culture conditions (37° C., 5% CO₂). Subcutaneous glioma tumors were generated by subcutaneous injection of 5×10⁵ C6 glioma cells, in 100 μl phosphate buffered saline (PBS), into the later aspect of the right rear thigh of 5-6 week-old male BALB/c athymic nu⁻/nu⁻ mice (25-30 g body weight).

### B. A549 Lung Cancer Xenografts

[0502] Human A549 lung cancer cells (ATCC No. CCL-185) were cultured in RPMI-1640 medium containing 10% FBS and 1% antibiotic-antimycotic solution (PAA Laboratories, Cölbe, Germany) under standard cell culture conditions (37° C., 5% CO₂). A549 xenograft tumors were developed in 5-6 week-old female athymic nude mice (NCI:Hsd:Athymic Nude Foxn1^{nu}, Harlan Borchem, Germany) by implanting 5×10⁶ cells subcutaneously in the hind right flank. Tumor growth was monitored by recording tumor size with a digital caliper. Tumor volume (mm³) was estimated by the formula ½(L×H×W), where L is the length, W is the width, and H is the height of the tumor in millimeters (mm). Treatment as described in Examples 4 and 5 below began after the tumors grew to about 200 mm³ in size (3 weeks).

### Example 3

### Co-Administration of GLV-1h68 and Bacteria

[0503] Light emitting E. coli (E. coli/pLITE) strains were created by transforming DH5a cells (ATCC, Rockville, Md.) with the luxCDABE-containing plasmid pLITE-201 (Voisey and Marincs (1998) BioTechniques 24:56-58). The transformed cells were selected by culturing the transformed bacteria in LB medium, supplemented with 100 μg/mL ampicillin, at 37° C. Mice bearing C6 glioma tumors as described in Example 2A were split into 3 groups, with 3 mice in each group. On days 11 and/or day 16, the groups of mice were administered 1×10⁷ plaque forming units (pfu) GLV-1h68 and/or 1×10⁸ colony forming units (cfu) E. coli/pLITE (in stationary phase) in 100 μL phosphate buffered saline (PBS) by intravenous injection using a 1-cc insulin syringe equipped with a 29½-gauge needle through the surgically exposed superficial femoral circumflex vein, according to Table 7 below. After each injection, the incision exposing the vein was re-approximated with 5-0 nylon sutures (Harvard Apparatus, Holliston, Mass.).

TABLE 7

| Group | Tumor day 11 | Tumor day 16 |
|---|---|---|
| 1 | 1 × 10⁷ pfu GLV-1h68 | 1 × 10⁸ cfu E. coli/pLITE |
| 2 | | 1 × 10⁸ cfu E. coli/pLITE + 1 × 10⁷ |
| | | pfu GLV-1h68 |
| 3 | | 1 × 10⁸ cfu E. coli/pLITE |

[0504] On tumor day 21, the animals were euthanized, under anesthesia, with Ketamine/Xylazine. The tumor tissues were excised and homogenized using a MagNA Lyser (Roche Applied Science, Indianapolis, Ind.) at 6500 rpm for 30s. Each sample was serially diluted with PBS and plated on selective agar plates with 100 mg/mL ampicillin. Bacterial colonies were counted after overnight incubation at 37° C. and used to calculate bacterial titers per tumor. Differences in the levels of bacterial colonization between groups were analyzed by t-test using SPSS 10.0 software. A P value of less than 0.05 was considered statistically significant.

[0505] The mice in Group 1 had on average approximately 5×10⁹ E. coli/pLITE/tumor, mice in group 2 had on average approximately 4×10⁹ E. coli/pLITE/tumor and mice in Group 3 had on average approximately 1×10⁹ E. coli/pLITE/tumor. t-test analysis indicated that Groups 1 and 2 had a significantly greater bacterial titer compared to Group 3. These data suggest that oncolytic VACV precolonization or coinjection may be used in conjunction with bacterial infection to increase the efficacy of bacterial colonization of tumors.

### Example 4

### Effect of Co-Administration of Antibiotics on Vaccinia Virus Treatment of Xenograft Tumors

[0506] The effect of co-administration of antibiotics and vaccinia virus was determined in A549 tumor bearing mice.

A. Treatment with Penicillin-Streptomycin

[0507] The A549 tumor bearing mice were split into 3 groups, with 10 mice in each group. 5×10⁶ plaque forming units (pfu) GLV-1h68 in 100 μL phosphate buffered saline (PBS) was administered via the retro-orbital (r.o.) sinus vein to mice in all 3 groups on day 0. A penicillin-streptomycin solution (PS) containing 10,000 I.U./mL penicillin and 10,000 μg/mL streptomycin (Cellgro, Cat. No. 30-002-C1) was administered via drinking water or via intraperitoneal injection. Mice in Group 2 were administered antibiotics in drinking water (6 mL PS+600 mL water) 2 times a week for 8 weeks starting on day 4 post viral infection. Mice in Group 3 were administered 200 μL PS/mouse via intraperitoneal injection 3 times a week for 8 weeks starting on day 4 post viral infection. Mice in Group 1 were not administered antibiotics. Mice were observed weekly to assess tumor volume, weight and any signs of toxicity.

[0508] The results show treatment with intraperitoneally administered penicillin-streptomycin and GLV-1h68 increased the survival rate and reduced the weight loss of A549 tumor bearing mice as compared to treatment with virus alone. 100% of mice receiving intraperitoneal penicillin-streptomycin were alive 56 days after virus injection as compared to only 20% of mice treated with GLV-1h68 virus only. Mice administered antibiotics via drinking water also had an increased survival rate compared to mice that were not administered antibiotics. Tumor volume decreased in all mice at approximately the same rate. Mice administered antibiotics intraperitoneally gained approximately 10% in net body weight whereas mice administered only virus lost approximately 20% of net body weight by day 49 after virus injection. Mice administered antibiotics via drinking water had exhibited no net change in body weight 49 days after virus injection, but a sharp decrease of 20% was observed by day 56. The results show that GLV-1h68 is effective at shrinking tumor volume in the presence of antibiotics administered intraperitoneally or via drinking water.

B. Treatment with Antibiotics or an Antibiotics-Antimycotic Solution

[0509] The A549 tumor bearing mice were split into 19 groups, with 8 mice in each group. 1×10⁷ plaque forming units (pfu) vaccinia virus in 100 μL phosphate buffered saline (PBS) was administered via the tail vain (t.v.) (groups 1-3) or the retro-orbital (r.o.) sinus vein (groups 4-19). Vaccinia viruses tested included GLV-1h68, GLV-1h74, GLV-1h96, GLV-1h99, GLV-1h108 and GLV-1h163. Mice were administered via intraperitoneal injection 200 μL of either a penicillin-streptomycin solution (PS) containing 10,000 I.U./mL penicillin and 10,000 μg/mL streptomycin (Cellgro, Cat. No. 30-002-C1) or an antibiotic-antimycotic solution (PSA) containing 10,000 I.U./mL penicillin, 10,000 vg/mL streptomycin and 25 vg/mL amphotericin B (Cellgro, Cat. No. 30-004-C1) according to Table 8 below for 9 weeks, starting 3 days after virus injection.

TABLE 8
Study Design

| | | Method of virus | | Antibiotic |
|---|---|---|---|---|
| Group | Virus | administration | Antibiotic | administration |
| 1 | GLV-1h68 | t.v. | PSA | 3x/week |
| 2 | GLV-1h68 | t.v. | PSA | 1x/week |
| 3 | GLV-1h68 | t.v. | None | |
| 4 | GLV-1h68 | r.o. | PS | 3x/week |
| 5 | GLV-1h68 | r.o. | PSA | 3x/week |
| 6 | GLV-1h68 | r.o. | PSA | 2x/week |
| 7 | GLV-1h68 | r.o. | PSA | 1x/week |
| 8 | GLV-1h68 | r.o. | None | |
| 9 | GLV-1h74 | r.o. | PSA | 3x/week |
| 10 | GLV-1h74 | r.o. | None | |
| 11 | GLV-1h96 | r.o. | PSA | 3x/week |
| 12 | GLV-1h96 | r.o. | None | |
| 13 | GLV-1h99 | r.o. | PSA | 3x/week |
| 14 | GLV-1h99 | r.o. | None | |
| 15 | GLV-1h108 | r.o. | PSA | 3x/week |
| 16 | GLV-1h108 | r.o. | None | |
| 17 | GLV-1h163 | r.o. | PSA | 3x/week |
| 18 | GLV-1h163 | r.o. | None | |
| 19 | None | | None | |

[0510] The mice were monitored weekly for 9 weeks to assess tumor volume, body weight and any signs of toxicity. Untreated, control (group 19) animals were sacrificed after 5 weeks. Tumor volume was estimated as described in Example 2B. The percent relative change in median tumor volume was calculated by the following formula:

Relative change median tumor volume (mtv)=(mtv_{day n}−mtv_{day 0})/mtv_{day 0}×100.

where mtv_{day n} is the median tumor volume on the day measured and mtv_{day 0} is the median tumor volume the day of virus infection (day 0).

[0511] Net body weight was using the following formula:

Net body weight=Total body weight−(tumor volume/1000).

The percent relative change in net body weight was calculated using the same formula used to calculate by the relative change in median tumor volume, substituting the values for the median net body weight on the day measured (day n) and the median net body weight the day of virus infection (day 0). The relative change in median tumor volume and the relative change in median net body weight, calculated only for groups which contained at least 3 surviving animals, are set forth in Tables 9 and 10, respectively. Tallies of surviving mice were taken daily and used to calculate the rate of survival for each of the treatment groups. The percent (%) survival over the course of the study is set forth in Table 12 below.

TABLE 9
Relative Change in Median Tumor Volume (%)

| | Days After Virus Injection | | | | | | | | |
|---|---|---|---|---|---|---|---|---|---|
| Group | 7 | 14 | 21 | 28 | 35 | 42 | 49 | 56 | 63 |
| 1 | 168.5 | 302.9 | 232.3 | 118.5 | 13.8 | −5.8 | nd | nd | nd |
| 2 | 173.8 | 313.7 | 273.1 | 137.6 | 24.0 | −4.9 | −13.0 | −50.2 | −22.3 |
| 3 | 126.2 | 206.3 | 161.2 | 61.5 | nd | nd | nd | nd | nd |
| 4 | 111.5 | 283.7 | 486.9 | 529.7 | 488.7 | 448.6 | 402.2 | 279.3 | 184.1 |
| 5 | 149.7 | 327.2 | 637.2 | 617.0 | 648.1 | 581.7 | 463.5 | 316.4 | 195.8 |
| 6 | 131.2 | 370.8 | 571.8 | 636.4 | 667.8 | 497.3 | 343.9 | 282.5 | 264.4 |
| 7 | 87.2 | 264.4 | 474.7 | 506.1 | 423.0 | 329.3 | 207.4 | 108.4 | 96.7 |
| 8 | 113.6 | 317.0 | 683.4 | 793.4 | 696.6 | 577.4 | 407.7 | 304.2 | 263.1 |
| 9 | 155.3 | 407.3 | 532.5 | 416.1 | 178.4 | 9.6 | nd | nd | nd |
| 10 | 116.2 | 261.3 | 385.5 | 285.2 | 177.4 | 75.2 | −15.3 | nd | nd |
| 11 | 124.9 | 296.7 | 530.3 | 522.5 | 434.4 | 294.9 | 281.7 | 165.7 | 134.0 |
| 12 | 126.7 | 436.4 | 602.3 | 624.9 | 517.6 | 395.4 | 281.4 | 118.3 | 104.9 |
| 13 | 127.8 | 345.9 | 368.1 | 306.3 | 186.0 | 110.8 | 16.7 | −14.4 | −23.4 |
| 14 | 144.3 | 254.5 | 347.9 | 287.5 | 205.2 | 166.7 | 85.5 | 78.1 | 11.9 |
| 15 | 59.6 | 111.8 | 167.8 | 189.5 | 141.3 | 105.7 | 87.1 | 65.2 | 57.5 |
| 16 | 55.2 | 92.6 | 206.4 | 165.5 | 136.5 | 51.4 | 29.1 | 35.0 | −17.3 |
| 17 | 79.7 | 109.1 | 263.2 | 292.5 | 230.7 | 211.1 | 160.2 | 115.4 | 77.1 |
| 18 | 83.1 | 115.2 | 167.4 | 193.0 | 108.9 | 51.6 | 38.9 | 19.8 | 21.0 |
| 19 | 95.0 | 220.8 | 644.0 | 945.4 | 1229.6 | nd | nd | nd | nd |

nd = not determined because the number of surviving mice (n) < 3

TABLE 11
Relative Change in Median Net Body Weight (%)

| | Days After Virus Injection | | | | | | | | |
|---|---|---|---|---|---|---|---|---|---|
| Group | 7 | 14 | 21 | 28 | 35 | 42 | 49 | 56 | 63 |
| 1 | −0.6 | −0.8 | −5.1 | −11.1 | −20.6 | −13.0 | nd | nd | nd |
| 2 | −1.2 | 1.3 | 0.6 | −0.8 | −1.5 | −2.5 | 2.6 | −1.3 | 0.1 |
| 3 | 0.7 | −5.9 | −13.3 | −27.0 | nd | nd | nd | nd | nd |
| 4 | 1.8 | 8.2 | 6.5 | 5.6 | 4.4 | 6.3 | 4.4 | 2.4 | −2.1 |
| 5 | 3.8 | 4.9 | 4.3 | 3.0 | 8.7 | 5.9 | 9.0 | 8.3 | 6.2 |
| 6 | 0.3 | 4.3 | 1.8 | 0.4 | 3.6 | 7.8 | 9.1 | 8.2 | 9.8 |
| 7 | 3.0 | 6.4 | −1.0 | −4.4 | −0.2 | 3.0 | 9.6 | 8.6 | 10.5 |
| 8 | 2.0 | 7.4 | 9.1 | 5.5 | 5.7 | 8.3 | 10.1 | 10.9 | 13.1 |
| 9 | 0.6 | 3.5 | −4.9 | −10.8 | −21.8 | −31.1 | nd | nd | nd |
| 10 | −1.8 | −4.5 | −5.5 | −7.4 | −9.6 | −19.3 | −28.6 | nd | nd |
| 11 | −3.3 | 3.8 | 2.7 | 0.6 | 3.0 | 2.2 | 10.8 | 7.6 | 11.4 |
| 12 | −2.9 | 3.8 | −0.3 | −2.1 | 5.1 | −0.8 | 1.7 | −6.3 | −9.0 |
| 13 | 2.5 | 3.6 | 1.4 | −2.8 | −1.3 | 2.0 | −6.4 | −18.1 | −24.7 |
| 14 | −0.8 | 0.7 | −0.7 | −6.2 | −3.8 | −1.4 | 1.5 | 5.0 | 3.7 |
| 15 | 1.4 | 3.4 | 2.7 | 2.7 | 5.3 | 7.8 | 9.9 | 10.8 | 11.8 |
| 16 | 0.1 | 2.6 | −1.1 | −0.7 | −1.1 | 1.7 | 7.6 | 6.6 | −0.7 |
| 17 | 0.2 | 4.2 | −2.0 | 2.9 | 6.6 | 7.8 | 10.4 | 10.3 | 15.4 |
| 18 | 0.8 | 3.5 | −0.5 | 0.9 | 6.3 | 6.2 | 10.2 | 7.8 | 13.4 |
| 19 | 16.1 | 19.6 | 18.2 | 17.8 | 22.3 | nd | nd | nd | nd |

nd = not determined because the number of surviving mice (n) < 3

TABLE 12
Percent (%) Animal Survival

| Days after | | | | | | | | | | | | | | | | | | | |
|---|---|---|---|---|---|---|---|---|---|---|---|---|---|---|---|---|---|---|---|
| virus | Group | | | | | | | | | | | | | | | | | | |
| injection | 1 | 2 | 3 | 4 | 5 | 6 | 7 | 8 | 9 | 10 | 11 | 12 | 13 | 14 | 15 | 16 | 17 | 18 | 19 |
| 0 | 100 | 100 | 100 | 100 | 100 | 100 | 100 | 100 | 100 | 100 | 100 | 100 | 100 | 100 | 100 | 100 | 100 | 100 | 100 |
| 20 | 100 | 100 | 87.5 | 100 | 100 | 100 | 100 | 100 | 100 | 100 | 100 | 100 | 100 | 100 | 100 | 100 | 100 | 100 | 100 |
| 23 | 100 | 100 | 75 | 100 | 87.5 | 100 | 100 | 100 | 100 | 100 | 100 | 100 | 100 | 100 | 100 | 100 | 100 | 100 | 100 |
| 24 | 100 | 100 | 62.5 | 100 | 87.5 | 87.5 | 100 | 100 | 100 | 100 | 100 | 100 | 100 | 100 | 100 | 100 | 100 | 100 | 100 |
| 28 | 100 | 100 | 37.5 | 100 | 87.5 | 87.5 | 100 | 100 | 100 | 100 | 100 | 87.5 | 100 | 100 | 100 | 100 | 100 | 100 | 100 |
| 29 | 100 | 100 | 25 | 100 | 87.5 | 87.5 | 100 | 100 | 100 | 100 | 100 | 87.5 | 100 | 100 | 100 | 100 | 100 | 100 | 100 |
| 30 | 100 | 100 | 25 | 100 | 75 | 87.5 | 100 | 100 | 100 | 100 | 100 | 87.5 | 100 | 87.5 | 100 | 100 | 100 | 100 | 100 |
| 33 | 87.5 | 100 | 25 | 100 | 75 | 87.5 | 100 | 100 | 100 | 100 | 100 | 87.5 | 100 | 87.5 | 100 | 100 | 100 | 100 | 100 |
| 34 | 75 | 100 | 25 | 100 | 75 | 87.5 | 100 | 100 | 100 | 100 | 100 | 87.5 | 100 | 87.5 | 100 | 100 | 100 | 100 | 100 |
| 35 | 75 | 100 | 25 | 100 | 75 | 87.5 | 100 | 100 | 100 | 100 | 100 | 87.5 | 100 | 87.5 | 100 | 100 | 100 | 100 | 100 |
| 36 | 62.5 | 75 | 12.5 | 100 | 75 | 87.5 | 100 | 100 | 62.5 | 87.5 | 87.5 | 87.5 | 87.5 | 62.5 | 100 | 100 | 100 | 100 | |
| 38 | 62.5 | 75 | 12.5 | 100 | 75 | 87.5 | 100 | 100 | 62.5 | 75 | 87.5 | 87.5 | 87.5 | 62.5 | 100 | 100 | 100 | 100 | |
| 39 | 50 | 75 | 12.5 | 100 | 75 | 87.5 | 100 | 100 | 62.5 | 75 | 87.5 | 87.5 | 87.5 | 62.5 | 100 | 100 | 100 | 100 | |
| 42 | 50 | 62.5 | 12.5 | 100 | 75 | 87.5 | 100 | 100 | 62.5 | 62.5 | 87.5 | 87.5 | 75 | 62.5 | 100 | 100 | 100 | 100 | |
| 44 | 50 | 62.5 | 12.5 | 100 | 75 | 87.5 | 87.5 | 87.5 | 25 | 62.5 | 75 | 87.5 | 75 | 62.5 | 100 | 87.5 | 100 | 100 | |
| 47 | 37.5 | 62.5 | 12.5 | 100 | 75 | 87.5 | 87.5 | 87.5 | 25 | 62.5 | 75 | 87.5 | 75 | 62.5 | 100 | 87.5 | 100 | 100 | |
| 48 | 25 | 62.5 | 12.5 | 100 | 75 | 87.5 | 87.5 | 87.5 | 25 | 62.5 | 75 | 87.5 | 75 | 62.5 | 100 | 87.5 | 100 | 100 | |
| 49 | 25 | 62.5 | 12.5 | 100 | 75 | 87.5 | 87.5 | 87.5 | 25 | 50 | 75 | 87.5 | 75 | 62.5 | 100 | 87.5 | 100 | 100 | |
| 50 | 12.5 | 62.5 | 12.5 | 100 | 75 | 87.5 | 87.5 | 87.5 | 25 | 37.5 | 75 | 87.5 | 75 | 62.5 | 100 | 87.5 | 100 | 100 | |
| 51 | 0 | 62.5 | 12.5 | 100 | 75 | 87.5 | 87.5 | 87.5 | 25 | 37.5 | 75 | 87.5 | 75 | 62.5 | 100 | 87.5 | 100 | 100 | |
| 55 | 0 | 62.5 | 12.5 | 100 | 75 | 87.5 | 87.5 | 87.5 | 25 | 25 | 75 | 87.5 | 75 | 62.5 | 100 | 87.5 | 100 | 100 | |
| 56 | 0 | 62.5 | 12.5 | 100 | 75 | 87.5 | 87.5 | 87.5 | 25 | 25 | 75 | 75 | 50 | 50 | 87.5 | 75 | 100 | 100 | |
| 57 | 0 | 62.5 | 12.5 | 100 | 75 | 87.5 | 87.5 | 87.5 | 12.5 | 25 | 75 | 75 | 37.5 | 50 | 87.5 | 75 | 100 | 100 | |
| 58 | 0 | 62.5 | 12.5 | 87.5 | 75 | 87.5 | 75 | 87.5 | 0 | 0 | 75 | 75 | 37.5 | 50 | 87.5 | 75 | 100 | 100 | |
| 63 | 0 | 62.5 | 12.5 | 87.5 | 75 | 87.5 | 62.5 | 87.5 | 0 | 0 | 75 | 75 | 37.5 | 50 | 87.5 | 75 | 100 | 100 | |

[0512] Untreated control mice showed a 1200% increase in tumor volume by day 35 (week 5). Mice in groups 5-8 treated with GLV-1h68 and PSA exhibited a peak in tumor volume on day 28 or day 35 (approximately 600% relative change) with a decrease in tumor volume from days 35 to 63. Mice treated only lx/week with PSA (group 7) exhibited the smallest increase in tumor volume (approximately 500% relative change), and after 63 days, the tumor size shrunk to only approximately 100% relative change in tumor volume. In addition, GLV-1h68 was more effective in the presence of antibiotics (groups 5-7) than in treatment with GLV-1h68 alone (group 8). GLV-1h74, GLV-1h96, GLV-1h99, GLV-1h108, and GLV-1h163 (groups 9-18) were all effective in reducing tumor volume in the presence and absence of PSA. In general, virus-infected animals, with or without antibiotics exhibited less net body weight gain than the untreated controls animals. Animal death contributed to fluctuation in median tumor volume and median net body weight values. These results show that vaccinia virus treatment of tumors is more effective in the presence of antibiotics.

### Example 5

### Effect of Gut Bacteria Depletion on Viral Colonization

[0513] The effect of depletion of gut bacteria on viral colonization was determined in A549 tumor bearing mice.

### A. Study Design

[0514] The A549 tumor bearing mice were split into 7 groups, with 4 or 8 mice in each group, as shown in Table 13 below. Groups 1, 2, and 3 were control groups receiving no treatment, treatment with antibiotics only or treatment with virus GLV-1h68 only, respectively. Treatment with antibiotics began after the tumors grew to about 200 mm³ in size (3 weeks). A combination of 4 antibiotics was administered to deplete gut bacteria. Ampicillin, neomycin, metronidazole and vancomycin were administered via oral gavage in an amount of 10 mg/antibiotic once a day from days 1-5, and again on days 14 and 15. All four antibiotics were also administered via drinking water containing 1 g/L ampicillin, neomycin and metronidazole and 500 mg/L vancomycin. Group 4 received antibiotics via drinking water on days 5-16 and Group 5 received antibiotics via drinking water on days 5-10, and Groups 6 and 7 received antibiotics via drinking water starting on day 5 and continuing through the end of the study (71 days post virus injection). Group 5 mice were recolonized with bacteria from feces of untreated mice by orally administering 100 μL mouse feces solution (2 feces in 1 mL deionized water) to each mouse on day 10. 5×10⁶ plaque forming units (pfu) GLV-1h68 in 100 μl phosphate buffered saline (PBS) was administered via the retro-orbital (r.o.) sinus vein on day 16 to mice in groups 3, 4, 5 and 6. Mice were observed weekly to assess tumor volume, weight and any signs of toxicity.

TABLE 13
Study Design

| | | A549 | Antibiotics | | Bacteria | |
|---|---|---|---|---|---|---|
| | | Implan- | Oral | | Recoloni- | Virus |
| Group | n | tation | Gavage | Water | zation | GLV-1h68 |
| 1 | 4 | day −20 | | | | |
| 2 | 4 | day −20 | days 1-5, | days 5-16 | | |
| | | | 14, 15 | | | |
| 3 | 8 | day −20 | | | | day 16 |
| 4 | 8 | day −20 | days 1-5, | days 5-16 | | day 16 |
| | | | 14, 15 | | | |
| 5 | 8 | day −20 | days 1-5 | days 5-10 | day 10 | day 16 |
| 6 | 8 | day −20 | days 1-5, | days 5-71 | | day 16 |
| | | | 14, 15 | | | |
| 7 | 4 | day −20 | days 1-5, | days 5-71 | | |
| | | | 14, 15 | | | |

### B. Bacterial Depletion and Recolonization

[0515] Feces were cultured to monitor intestinal bacteria after antibiotic treatment. Two (2) feces per mouse were collected on days 8, 12, and 16 after antibiotic treatment (4-5 mice per group). Serial dilutions of feces in PBS were spread on HBI blood agar plates and incubated at 37° C. under anaerobic conditions. Bacterial colonies were counted 2 days after incubation and reported as colony forming units/grams feces (CFU/g feces).

[0516] The results are shown in Table 14 below. The results show that, on day 8, mice in Group 3 which were not treated with antibiotics had a 3.46×10⁸ times reduction in colony forming units of bacteria compared to the antibiotic treated group (Group 5). After recolonization on day 10, bacteria were reestablished to normal levels by day 12.

TABLE 14
Bacterial Load (CFU/g)

| Group | Day 8 | Day 12 |
|---|---|---|
| Untreated (Group 3) | 8.5E+09 | 6.0E+09 |
| Ab.T + Recolonization (Group 5) | 2E+01 | 1E+09 |

C. Treatment with Antibiotics Increases Virus Intensity in Tumors

[0517] Mice in Groups 3-6 were analyzed for the presence of GLV-1h68 virus-dependent luciferase activity 6 days post virus injection. In short, mice were injected intraperitoneally with a mixture of 5 μL coelenterazine (Sigma; 0.5 mg/mL diluted ethanol solution) and 95 μL luciferase assay buffer (0.5 M NaCl, 1 mM EDTA and 0.1 M potassium phosphate, pH 7.4). Bioluminescence was measured from dorsal views of the animals using the Carestream Imaging System and reported as relative luminescence units (RLU).

[0518] The results are shown in Table 15 below. The results show a reduction in gut bacteria resulted in increased viral replication in tumors. Treatment with antibiotics and GLV-1h68 (Group 4 and Group 6) resulted in mice with increased tumor luminescence intensity as compared to mice treated with GLV-1h68 alone (Group 3) or mice recolonized with bacteria prior to viral treatment (Group 4).

TABLE 15
Luminescent intensity in Tumors (RLU)

| Treatment Group | Median | Average |
|---|---|---|
| GLV-1h68 | 3.04E+04 | 6.13E+04 ± 6.44E+04 |
| (Group 3) | | |
| AbT + GLV-1h68 | 1.36E+05 | 1.98E+05 ± 2.23E+05 |
| (Group 4) | | |
| AbT + Recolonization + GLV-1h68 | 4.27E+04 | 8.02E+04 ± 7.44E+04 |
| (Group 5) | | |
| AbT + GLV-1h68 + AbT-W | 2.71E+05 | 2.11E+05 ± 1.49E+05 |
| (Group 6) | | |

### D. Viral Distribution in Tumor and Organ Tissue

[0519] Three mice each from groups 3, 4 and 5 were sacrificed 7 days post virus injection and internal organs were removed. Viral distribution in tumor and organ tissue was determined by standard plaque assays. In short, tumor tissue, and tissue from organs, including lung, kidney, heart, brain and liver, were suspended in 500 mL PBS containing protease inhibitor and homogenized for 30 seconds at a speed of 6500 rpm. After homogenization, samples were subjected to 3 freeze-thaw cycles. Samples were then centrifuged for 5 minutes at 3000 g at 4° C., supernatants were collected, and serial dilutions made. Standard plaque assays were performed on CV-1 cell monolayers and recorded as plaque forming units/grams (pfu/g).

[0520] The results are shown in Table 16 below. The results show that treatment with antibiotics increased viral titers in tumors, but not in healthy organs. Mice from Group 4, which were treated with antibiotics and GLV-1h68, had a 2.5-fold increase in viral titer compared to mice in Groups 3 and 5 which were either not treated with antibiotics, or were treated with antibiotics but recolonized with bacteria prior to virus injection. GLV-1h68 was not detected in the healthy organs of 8 of 9 mice sampled from groups 3, 4, and 5. One mice from Group 4, treated with antibiotics and GLV-1h68, contained trace amounts of GLV-1h68 in brain tissue, with no observation of GLV-1h68 in the liver, kidney, lung or heart of the same mice.

TABLE 16
Virus distribution in tumors and healthy organs (pfu/g)

| Virus (Group) | Tumor | Liver | Kidney | Lung | Heart | Brain |
|---|---|---|---|---|---|---|
| GLV-1h68 | 2.96E+05 | nd | nd | nd | nd | nd |
| (Group 3) | 5.55E+05 | nd | nd | nd | nd | nd |
| | 3.67E+04 | nd | nd | nd | nd | nd |
| AbT + GLV-1h68 | 2.54E+05 | nd | nd | nd | nd | 58 |
| (Group 4) | 1.05E+06 | nd | nd | nd | nd | nd |
| | 9.38E+05 | nd | nd | nd | nd | nd |
| AbT + | 8.71E+04 | nd | nd | nd | nd | nd |
| Recolonization + | 5.64E+05 | nd | nd | nd | nd | nd |
| GLV-1h68 | 5.12E+04 | nd | nd | nd | nd | nd |
| (Group 5) | | | | | | |

nd = not detected

### E. Effect on Tumor Growth

[0521] Tumor growth was measured, as described in Example 2B above, on the day antibiotic treatment commenced and weekly thereafter for 10 weeks, i.e., on days 0, 7, 14, 21, 28, 35, 42, 49, 56, 63, and 70 days post antibiotic treatment. The average tumor volume and corresponding standard deviation for each group at each time point is set forth in Table 17.

TABLE 17
Tumor Volume (mm³)

| days post anti- | Group 1 | | Group 2 | | Group 3 | | Group 4 | |
|---|---|---|---|---|---|---|---|---|
| biotic treatment | Average | SD | Average | SD | Average | SD | Average | SD |
| 0 | 175.80 | 41.00 | 199.46 | 59.47 | 159.88 | 28.75 | 161.18 | 50.05 |
| 7 | 224.17 | 86.87 | 379.75 | 93.21 | 353.74 | 58.89 | 285.11 | 102.33 |
| 14 | 314.99 | 101.03 | 561.38 | 193.59 | 406.10 | 86.40 | 355.70 | 162.89 |
| 21 | 468.93 | 151.97 | 791.75 | 143.07 | 623.76 | 131.01 | 577.18 | 281.59 |
| 28 | 491.39 | 180.54 | 975.44 | 247.05 | 736.75 | 236.25 | 614.33 | 380.24 |
| 35 | 619.04 | 257.86 | 1246.36 | 412.22 | 845.94 | 406.94 | 635.94 | 376.31 |
| 42 | 719.98 | 337.48 | 1465.88 | 491.51 | 809.41 | 439.85 | 510.50 | 338.53 |
| 49 | 969.82 | 433.21 | 1803.79 | 514.70 | 672.39 | 466.30 | 460.84 | 364.86 |
| 56 | 1042.12 | 530.81 | 2302.55 | 841.56 | 528.51 | 408.83 | 267.91 | 207.47 |
| 63 | 1228.29 | 643.95 | 2813.46 | 816.79 | 429.06 | 395.21 | 219.93 | 144.79 |
| 70 | 1526.78 | 762.54 | 3106.10 | 793.44 | 393.13 | 332.74 | 153.91 | 124.16 |

| days post anti- | Group 5 | | Group 6 | | Group 7 | |
|---|---|---|---|---|---|---|
| biotic treatment | Average | SD | Average | SD | Average | SD |
| 0 | 219.21 | 41.85 | 193.29 | 55.54 | 209.26 | 46.82 |
| 7 | 316.22 | 46.96 | 350.24 | 102.36 | 354.39 | 92.24 |
| 14 | 443.50 | 71.74 | 458.61 | 169.34 | 549.08 | 169.67 |
| 21 | 562.80 | 110.45 | 685.60 | 251.50 | 799.82 | 182.18 |
| 28 | 821.00 | 105.03 | 865.41 | 385.21 | 961.67 | 288.85 |
| 35 | 968.85 | 210.36 | 922.88 | 338.80 | 1159.41 | 372.14 |
| 42 | 942.40 | 379.27 | 689.40 | 307.01 | 1532.33 | 433.03 |
| 49 | 814.06 | 453.80 | 509.63 | 320.21 | 1806.61 | 595.91 |
| 56 | 732.58 | 674.74 | 355.59 | 205.03 | 2051.64 | 595.23 |
| 63 | 713.85 | 742.48 | 293.91 | 142.88 | 2585.24 | 778.44 |
| 70 | 497.35 | 497.01 | 239.88 | 118.72 | 2730.33 | 732.32 |

[0522] Untreated animals (Group 1) exhibited progressive tumor growth, resulting in a tumor volume that was approximately 9 times the starting tumor volume by day 70 (1527 mm³ vs. 176 mm³). Animals treated with antibiotic only, whether receiving antibiotics through day 15 (Group 2) or through day 71 (Group 7), exhibited accelerated tumor growth compared to untreated, Group 1 animals, that continued through the course of the study. For example, by day 70, the average tumor size of Group 2 animals, which began the study with an average tumor volume of 160 mm³, was 3106 mm³, almost a 20-fold increase. Group 7 animals exhibited a similar increase in tumor volume, increasing from 209 mm³ to 2730 mm³. The tumor volume of animals administered GLV-1h68 only (Group 3), GLV-1h68 plus antibiotics (Group 4), GLV-h68 plus antibiotics and recolonization (Group 5), and GLV-1h68 plus antibiotics for the duration of the study, peaked at day 35 with a tumor volume that was 4 to 5 times the size of the average starting tumor volume, which was similar to the average tumor volume observed for untreated animals (Group 1). After day 35, the tumors of the animals in Groups 3-6 decreased in volume. The average tumor volume in animals treated with GLV-1h68 and antibiotics reduced to a volume that was approximately the same (Group 6) or less than (Group 4) the starting tumor volume. By the end of the study, the tumors animals receiving virus only (Group 3) were still approximately 2.5 times the volume of the average tumors at the start of the study. These results demonstrate that treatment of tumor bearing animals with antibiotics alone feeds tumor progression, treatment with GLV-1h68 is effective in reducing and reversing tumor growth, and GLV-1h68 in combination with antibiotic treatment is more effective at reversing tumor growth than virus treatment alone.

### F. Effect on Immune Cell Populations

[0523] Immune cell populations were determined by measuring changes in immune cells and interferon gamma production in mice sacrificed 7 days post virus injection. Flow cytometry was used to determine the change in immune cells, including NK cells, dendritic cells (DCs), Macrophages and B cells, in blood and spleen samples.

[0524] 1. Blood Samples

[0525] For blood samples, whole blood from the tumor bearing mouse was collected by cardiac puncture in anti-coagulated tubes. Red blood cells were lysed with 1× red blood cell lysis buffer (BD Biosciences). About 400,000 peripheral blood mononuclear cells (PBMC) were labeled with the antibody mixes set forth in Table 18 to detect 1) Macrophages, 2) dendritic cells (DCs), and 3) NK and B cells. Labeled cells were analyzed using a Beckman Coulter Cell Lab Quanta SC flow cytometer. The results are set forth in Table 19 below.

TABLE 18
Antibody (Ab) mixes

| Fluorescent | | | | PerCp- | APC or | |
|---|---|---|---|---|---|---|
| Conjugate | V450 | FITC | PE | Cy5.5 | Alexa Fluor 647 | APC-Cy7 |
| Macrophage Ab Mix | CD14 | | IA-IE | F4/80 | CXCR4 | CD11b |
| | | | | | (CD184-APC) | |
| DC Ab Mix | | CD282 | IA-IE | CD80 | CD205 | CD11c |
| | | (TLR2) | | | | |
| NK & B cell Ab Mix | | CD45R | DX5 | NKp46 | CD19 | Gr-1 |
| | | (B220) | (CD49b) | (CD335) | | (Ly-6C/Ly-6G) |

TABLE 19
Number of Immune Cells per mL of Blood

| | Mac | | Monocytes | | NK cells | | B cells | |
|---|---|---|---|---|---|---|---|---|
| | Average | SD | Average | SD | Average | SD | Average | SD |
| GLV-1h68 | 507168 | 481257 | 750906 | 546651 | 518148 | 193191 | 673002 | 261116 |
| (Group 3) | | | | | | | | |
| AbT-GLV-1h68 | 1456920 | 1012808 | 999378 | 214826 | 751743 | 67921 | 698643 | 427974 |
| (Group 4) | | | | | | | | |
| AbT-Rec-GLV-1h68 | 1415952 | 746160 | 874359 | 200426 | 835668 | 192494 | 670365 | 259781 |
| (Group 5) | | | | | | | | |

[0526] The number of circulating macrophages was increased approximately 3-fold in antibiotic-treated cells (Groups 4 and 5) compared to GLV-1h68 infected cells alone (Group 3). Recolonization did not affect the number of circulating macrophages. The other immune cells, monocytes, NK cells and B cells were present in the blood at similar levels for all three treatment Groups.

[0527] 2. Spleen Samples

[0528] For spleen samples, spleens were freshly excised and used to generate single cell suspensions by gently crushing with a frosted microscope slide into a Petri dish. Splenocyte suspensions were passed 3 times through a 20-G1″ needle and then through a 70 gm nylon mesh Cell Strainer (BD Bioscience). Cells were harvested by centrifugation at 1200 rpm for 10 min. The red blood cells were lysed with 1× red blood cell lysis buffer (BD Biosciences). RPMI, supplemented with 5% FBS was added to stop the lysis reaction. The resulting cell suspension was passed through a 40 μm nylon mesh Cell Strainer (BD Biosciences) to remove remaining cell aggregates. Single cell suspensions containing about 900,000 cells were labeled using the antibody mixes described in Table 18 above to detect Macrophages, NK and B cells. Labeled cells were analyzed using a Beckman Coulter Cell Lab Quanta SC flow cytometer. The results are set forth in Table 20 below.

TABLE 20
Number of Immune Cells Detected per Spleen

| | Macrophages | | NK cells | | B cells | |
|---|---|---|---|---|---|---|
| | Average | SD | Average | SD | Average | SD |
| GLV-1h68 | 1712900 | 718132 | 4419833 | 872629 | 28235467 | 5843562 |
| (Group 3) | | | | | | |
| AbT-GLV-1h68 | 1569500 | 483063 | 4351200 | 378159 | 25071167 | 5013345 |
| (Group 4) | | | | | | |
| AbT-Rec-GLV-1h68 | 1712333 | 95438 | 3786767 | 378159 | 22596933 | 11705837 |
| (Group 5) | | | | | | |

[0529] Animals infected with GLV-1h68 and treated with antibiotics, with or without bacterial Recolonization (Groups 4 and 5) alone (Group 3), contained similar numbers of macrophages, NK cells and B cells as animals infected with virus alone. Taken together with the results from the blood samples above, these results indicate the elevated macrophage levels in the blood are not a result of general upregulation of macrophage production, but likely represent increased differentiation and/or infiltration of inflammatory macrophages.

### Example 6

### In vivo Treatment with GLV-1h68 and Antibiotics

[0530] In this example, the effect of vaccinia virus treatment in conjugation with the administration of antibiotics was determined in vivo in cancer patients treated with GLV-1h68.

### A. Methods

[0531] 1. Administration of GLV-1h68 and Antibiotics

[0532] A cancer patient was administered 1×10⁷ pfu GLV-1h68 intraperitoneally (i.p.) (10 minute infusion, 500 mL volume) on day on 1 of the treatment cycle. The patient was subsequently administered tazobactam, meropenem and vancomycin intravenously between days 9 and 22 as set forth in Table 21. A second cancer patient was administered 1×10⁷ pfu GLV-1h68 intraperitoneally (10 minute infusion, 500 mL volume) on day 1 of the treatment cycle but was not administered antibiotics. Efficacy of viral therapy was determined by measuring viral replication, e.g., shedding, using a viral plaque assay and detection of virus encoded reporter protein β-glucuronidase, inflammatory responses and oncolytic efficacy.

TABLE 21
Dosage regimen for treatment with vaccinia virus and antibiotics

| | Days of | | | | |
|---|---|---|---|---|---|
| | Admin- | | | Frequency of | Route of |
| Treatment | istration | Dosage | | Administration | Administration |
| GLV-1h68 | 1 | 1 × 10⁷ | pfu | 1 dose | i.p. |
| Tazobactam | 7-9 | 4.5 | g | 3x/day | i.v. |
| Meropenem | 9-22 | 1 | g | 3x/day | i.v. |
| Vancomycin | 9-21 | 1 | g | 1x/day | i.v. |

[0533] 2. Viral Replication

[0534] Viral replication was assessed by viral plaque assay (VPA) and β-glucuronidase production as described below.

[0535] a. Viral Particle Assay

[0536] The number of infectious virus particles in body fluids and samples was assessed using a standard viral plaque assay, using serial dilutions on CV-1 cells, and expressed as pfu/mL (Yu et al., (2004) Nat Biotechnol. 22:313-320). Viral particles were stained with a specific anti-A27L antibody, which was custom made against a VACV synthetic peptide (GenScript Corporation). Body fluids and samples tested included peritoneal fluid, full blood, blood cells, blood lysates, urine, sputum and anal swab. For sampling of peritoneal fluid from the patient receiving viral therapy and antibiotics, ascites were sampled on days 4-14 and peritoneal lavage was sampled on days 16-59. Ascites were tested in the patient receiving only viral therapy. VPA was assessed 2 hours post viral treatment, and daily for 59 days. Viral particle counts were reported as pfu/mL.

[0537] b. β-Glucuronidase Assay

[0538] The GLV-1h68 virus contains a gene encoding β-glucuronidase which can be used as a marker protein for viral replication and cell lysis. β-glucuronidase release was measured in peritoneal fluid and EDTA plasma. Samples (20 μL) were incubated with 3.75 μg 4-MUG for one hour at 37° C. Fluorescence was then determined using a SpectraMax M5 fluorometer and was reported as relative fluorescence units per mL (RFU/mL).

### B. Results

[0539] The results show the patient receiving viral therapy and antibiotics had significant prolonged inherent (in situ) intraperitoneal production of GLV-1h68 progeny viral particles compared to the patient that only received viral therapy. Virus particles were observed in the antibiotic treated patient on days 4 through day 22, whereas viral particles tapered off after day 8, with only small amounts detected on days 10-12 for the patient that did not receive antibiotics. On day 8, virus yield in the patient treated with antibiotics was 1.54×10⁸, 15 times higher than the input virus dosage. Viral shedding was not observed in other fluids or samples that were tested.

[0540] β-Glucuronidase activity was detected in the peritoneal fluid and EDTA plasma of the patient treated with GLV-1h68 and antibiotics between days 4 and 59, with a peak in activity on days 10-11. In contrast, β-glucuronidase activity was only detected through day 12, with a peak in activity in peritoneal fluid at day 9 in the patient that only received viral therapy.

[0541] Overall, the results show that treatment with GLV-1h68 and antibiotics resulted in increased and prolonged viral efficacy as compared to treatment with viral therapy alone.

[0542] Since modifications will be apparent to those of skill in this art, it is intended that this invention be limited only by the scope of the appended claims.

1. A method for enhancing the effectiveness of a therapeutic virus, comprising administering an antibiotic with, before, after or during treatment with the therapeutic virus, to inhibit the growth of or kill commensal gut bacteria to thereby reduce the number of gut bacteria, wherein:
the antibiotic is an antibiotic that inhibits the growth of or kills commensal gut bacteria and is not an anti-cancer antibiotic; and
the antibiotic is administered in an amount that reduces or eliminates commensal gut bacteria.

2. The method of claim 1, wherein the therapeutic virus is administered to provide gene therapy and/or to treat cancers and tumors.

3. The method of claim 1, wherein the therapeutic virus is an oncolytic virus.

4. The method of claim 1, wherein the therapeutic virus is selected from among a retrovirus, adenovirus, lentivirus, herpes simplex virus, poxvirus and adeno-associated virus (AAV).

5. The method of claim 4, wherein the therapeutic virus is an oncolytic virus selected from among Newcastle Disease virus, parvovirus, vaccinia virus, measles virus, reovirus, oncolytic adenoviruses and vesicular stomatitis virus (VSV).

6. The method of claim 1, wherein the therapeutic virus is a vaccinia virus.

7. A method for treating cancers or tumors, comprising:
administering a therapeutic virus for treatment of cancers, tumors or metastases, wherein the therapeutic virus is effective for treating one or more of cancers, tumors or metastases; and
administering an antibiotic that is effective against commensal gut bacteria, wherein:
the antibiotic is administered before, after or with the therapeutic virus; and
the antibiotic is administered in an amount that reduces or eliminates commensal gut bacteria.

8. The method of claim 7, wherein the therapeutic virus is an oncolytic virus.

9. The method of claim 7, wherein the therapeutic virus is selected from among a retrovirus, adenovirus, lentivirus, herpes simplex virus, poxvirus and adeno-associated virus (AAV).

10. The method of claim 8, wherein the therapeutic virus is an oncolytic virus selected from among Newcastle Disease virus, parvovirus, a pox virus, measles virus, reovirus, vesicular stomatitis virus (VSV), oncolytic adenovirus, poliovirus and herpes simplex virus.

11. The method of claim 7, wherein the therapeutic virus is a vaccinia virus.

12. The method of claim 10, wherein the therapeutic virus is a pox virus that is a strain selected from among Western Reserve (WR), Copenhagen, Tashkent, Tian Tan, Lister, Wyeth, IHD-J, and IHD-W, Brighton, Ankara, MVA, Dairen I, LIPV, LC16M8, LC16MO, LIVP and WR 65-16 strains and modified forms of the strains.

13. The method of claim 6, wherein the therapeutic virus is a Wyeth strain derived virus designated JX-294 or JX-594 or is an LIVP virus that is the virus designated GLV-1h68 and derivatives and modified forms thereof.

14. The method of claim 11, wherein the vaccinia virus a Lister strain virus.

15. The method of claim 14, wherein the virus is an LIVP virus, a clonal strain of an LIVP virus, or a modified form thereof containing nucleic acid encoding a heterologous gene product.

16. The method of claim 15, wherein the nucleic acid encoding the heterologous gene product is inserted into or in place of a non-essential gene or region in the genome of the virus.

17. The method of claim 16, wherein the nucleic acid encoding the heterologous gene product is inserted at the hemagglutinin (HA), thymidine kinase TK), F14.5L, vaccinia growth factor (VGF), A35R, N1L, E2L/E3L, K1L/K2L, superoxide dismutase locus, 7.5K, C7-K1L, B13R+B14R, A26L or 14L gene loci in the genome of the virus.

18. The method of claim 15, wherein the virus is an LIVP virus or modified form thereof comprising a sequence of nucleotides set forth in SEQ ID NO:2, or a sequence of nucleotides that has at least 95% sequence identity to SEQ ID NO:2.

19. The method of claim 15, wherein the virus is a clonal strain of LIVP or a modified form thereof comprising a sequence of nucleotides selected from:
a) nucleotides 2,256-180,095 of SEQ ID NO:3, nucleotides 11,243-182,721 of SEQ ID NO:4, nucleotides 6,264-181,390 of SEQ ID NO:5, nucleotides 7,044-181,820 of SEQ ID NO:6, nucleotides 6,674-181,409 of SEQ ID NO:7, nucleotides 6,716-181,367 of SEQ ID NO:8 or nucleotides 6,899-181,870 of SEQ ID NO:9;
b) a sequence of nucleotides that has at least 97% sequence identity to a sequence of nucleotides 2,256-180,095 of SEQ ID NO:3, nucleotides 11,243-182,721 of SEQ ID NO:4, nucleotides 6,264-181,390 of SEQ ID NO:5, nucleotides 7,044-181,820 of SEQ ID NO:6, nucleotides 6,674-181,409 of SEQ ID NO:7, nucleotides 6,716-181,367 of SEQ ID NO:8 or nucleotides 6,899-181,870 of SEQ ID NO:9.

20. The method of claim 19, wherein the virus comprises a sequence of nucleotides set forth in any of SEQ ID NOS: 3-9, or a sequence of nucleotides that has at least 97% sequence identity to a sequence of nucleotides set forth in any of SEQ ID NOS: 3-9.

21. The method of claim 15, wherein the virus comprises heterologous nucleic acid that comprises a reporter gene or encodes a detectable gene product or a product that produces a detectable signal.

22. The method of claim 21, wherein the reporter gene encodes a fluorescent protein, a bioluminescent protein, a receptor or an enzyme.

23. The method of claim 22, wherein the encoded gene product is a fluorescent protein selected from among a green fluorescent protein, an enhanced green fluorescent protein, a blue fluorescent protein, a cyan fluorescent protein, a yellow fluorescent protein, a red fluorescent protein, or a far-red fluorescent protein.

24. The method of claim 15, wherein the virus encodes a product that is detectable or that induces a detectable signal.

25. The method of any of claim 15, wherein the virus comprises nucleic acid encoding a heterologous gene product that is a therapeutic agent a diagnostic agent or comprises a plurality thereof.

26. The method of claim 25, wherein the heterologous gene product is selected from among an anticancer agent, an antimetastatic agent, an antiangiogenic agent, an immunomodulatory molecule, an antigen, a cell matrix degradative gene, genes for tissue regeneration and reprogramming human somatic cells to pluripotency, enzymes that modify a substrate to produce a detectable product or signal or are detectable by antibodies, proteins that can bind a contrasting agent, genes for optical imaging or detection, genes for PET imaging and genes for MRI imaging.

27. The method of claim 15, wherein the virus comprises a sequence of nucleotides selected from among any of SEQ ID NOS:1 and 10-19, or a sequence of nucleotides that exhibits at least 99% sequence identity to any of SEQ ID NOS: 1 and 10-19.

28. The method of claim 7, wherein the antibiotic is administered in an amount between about 1 mg and about 1000 mg.

29. The method of claim 7, wherein the antibiotic is administered prior to the administration of the virus.

30. The method of claim 29, wherein the antibiotic is administered at least, at about or at 1, 2, 3, 4, 5, 6, 7, 8, 9, 10, 11, 12, 13, 14, 15, 16, 17, 18, 19, 20, 21, 22, 23, 24, 36 or 48 or more hours prior to the administration of the virus.

31. The method of claim 7, wherein the antibiotic is administered at the same time as the administration of the virus.

32. The method of claim 7, wherein the antibiotic is administered after the administration of the virus.

33. The method of claim 32, wherein the antibiotic is administered at least, at about or at 1, 2, 3, 4, 5, 6, 7, 8, 9, 10, 11, 12, 13, 14, 15, 16, 17, 18, 19, 20, 21, 22, 23, 24 or more hours, or 2, 3, 4, 5, 6, 7, 8, 9, 10, 11, 12, 13, 14 or more days after the administration of the virus.

34. The method of claim 7, wherein the antibiotic is administered a plurality of times.

35. The method of claim 7, wherein the antibiotic is selected from among penicillins, penicillin combinations, tetracyclines, β-lactam antibiotics, carbacephems, glycopeptides, aminoglycosides, ansamycins, macrolides, monobactams, nitrofurans, sulfonamides, lincosamides, lipopeptides, polypeptides, quinolones, drugs against mycobacteria, oxazolidinones, arsphenamine, chloramphenicol, fosfomycin, fusidic acid, metronidazole, tazobactam, mupirocin, platensimycin, quinupristin/dalfopristin, thiamphenicol, tigecycline, tinidazole or trimethoprim and mixtures thereof.

36. The method of claim 7, wherein the antibiotic is selected from among penicillin, streptomycin, ampicillin, neomycin, metronidazole, vancomycin, tazobactam, meropenem, a mixture of penicillin and streptomycin, a mixture of ampicillin, neomycin, metronidazole and vancomycin, and a mixture of tazobactam, meropenem and vancomycin.

37. The method of claim 7, further comprising administering an antimycotic with the antibiotic or before or after the administration of the antibiotic or with the administration of the virus or before or after the administration of the virus, wherein the antimycotic is administered in an amount effective for treatment of any fungal infections.

38. A combination, comprising:
a first composition, comprising a therapeutic virus in a pharmaceutically acceptable vehicle, and
a second composition, comprising an antibiotic in a pharmaceutically acceptable vehicle, wherein the antibiotic inhibits the growth of or kills commensal gut bacteria to thereby reduce the number of gut bacteria and is not an anti-cancer antibiotic.

39. The combination of claim 38, wherein the therapeutic virus provides gene therapy and/or treats cancers and tumors.

40. The combination of claim 38, wherein the therapeutic virus is an oncolytic virus.

41. The combination of claim 38, wherein the therapeutic virus is a pox virus.

42. The combination of claim 41, wherein the therapeutic virus is a vaccinia virus.

43. The combination of claim 41, wherein the therapeutic virus is a pox virus that is a strain selected from among Western Reserve (WR), Copenhagen, Tashkent, Tian Tan, Lister, Wyeth, IHD-J, and IHD-W, Brighton, Ankara, MVA, Dairen I, LIPV, LC16M8, LC16MO, LIVP and WR 65-16 strains and modified forms of the strains.

44. The combination of claim 43, wherein the therapeutic virus is an LIVP strain virus.

45. The combination of claim 44, wherein the LIVP strain virus is the virus designated GLV-1h68 and derivatives and modified forms thereof.

46. The combination of claim 43, wherein the therapeutic virus is a Lister strain virus.

47. The combination of claim 38, wherein the antibiotic is selected from among penicillins, penicillin combinations, tetracyclines, β-lactam antibiotics, carbacephems, glycopeptides, aminoglycosides, ansamycins, macrolides, monobactams, nitrofurans, sulfonamides, lincosamides, lipopeptides, polypeptides, quinolones, drugs against mycobacteria, oxazolidinones, arsphenamine, chloramphenicol, fosfomycin, fusidic acid, metronidazole, tazobactam, mupirocin, platensimycin, quinupristin/dalfopristin, thiamphenicol, tigecycline, tinidazole or trimethoprim and mixtures thereof.

The application's sequence listing, which the Patent Office published only in electronic form, follows.

SEQUENCE LISTING (39 sequences)

SEQ ID NO: 1 - DNA, 203057 bp, Vaccinia virus
  GLV-1h68
ttatgagaccatcaaagagagaaagagaataaaaatatttttgtaaaactttttttatgagaccatcaaagagagaaagagaataaaaatatttttgtaaaacttttttatgagaccatcaaagagagaaagagaataaaaatatttttgtaaaacttttttatgagaccatcaaagagagaaagagaataaaaatatttttgtaaaactttttttatgagaccatcaaagagagaaagagaataaaaatatttttgtaaaactttttttatgagaccatcaaagagagaaagagaataaaaatatttttgtaaaactttttttatgagaccatcaaagagagaaagagaataaaaatatttttgtaaaactttttttatgagaccatcaaagagagaaagagaataaaaatatttttgtaaaactttttttatgagaccatcaaagagagaaagagaataaaaatatttttgtaaaactttttttatgagaccatcaaagagagaaagagaataaaaatatttttgtaaaactttttttatgagaccatcaaagagagaaagagaataaaaatatttttgtaaaactttttttatgagaccatcaaagagagaaagagaataaaaatatttttgtaaaactttttttatgagaccatcaaagagagaaagagaataaaaatatttttgtaaaactttttttatgagaccatcaaagagagaaagagaataaaaatatttttgtaaaactttttttatgagaccatcaaagagagaaagagaataaaaatatttttgtaaaactttttttatgagaccatcagaaagaggtttaatatttttgtgatactctgaaaggaaataggaataggaataggaatagtgtcataatcgtatcacactattgagacagaaaaagaagaagtcgcgagaggtaactttttgtgaatgtagttaagaacatttttgttttgcaaaccggaatatagtgtccggtacacttttttaattcgtggtgtgcctgaatcgttcgattaaccctactcatccaatttcagatgaatagagttatcgattcagacacacgctttgagttttgttgaatcgatgagtgaagtatcatcggttgcaccttcagatgccgatccgtcgacatacttgaatccatccttgacctcaagttcagatgattccttgcacatgtctccgatacgaacgctaaactctagattcttgacgcattttgtatcgacgatcgttgaaccgatgatatcttcgtaactcactttcttatgagagatgttagacccgagtactggatgggtcttgatgtcgctgtctttctcttcttcgctacatctgatgtcgatagacacttcacagtctttgatcatagcaagagcttcttcatgagtgatcgcgggagagtccttaccttgtcctggggacacgctggacaatctagcattcactgtgtttccatcagcggattctgagatggatttaatctgaggacatttggtgaatccaaagttcattctcagacctccaccgatgatggagtaataagtggtaggaggatctacatcctcgactgatgtggaatcatcttctgattccacctcgggatctggatctgactcggactctgtaatttccgttacggattggcaaatcttatcattggtcggtgtttggtcttgctttgtgactttgataataacatcgattcccatatgatgtttgttttcttcttccgtacacgaggaggaggatgaggatgattgctgaagactggcaggcatagcagctgccgccaggcacatgcatgccaggacgatatattgtttcataattgctattgattgagtactgttctttatgattctacttccttaccgtgcaataaattagaatatattttctacttttacgagaaattaattattgtatttattatttatgggtgaaaaacttactataaaaagtgggtgggtttggaattagtgatcagtttatgtatatcgcaactaccgggcatatggctatcgacatcgagaacattacccacatgataagagattgtatcagtttcgtagtcttgagtattggtattactatatagtatatagatgtcgcccactagagttactgtctccgaatgcggcatgatagtatcattctttgctttcgttaactgtttggaggaagaatctttgttattgcatttaatctcgaaattcagagtgcacacctttctcctgtaaagaaacctgaagtcgctaccttattaagaacggagaagtatccatcacgaaatacgggattacagtctttatgattcatagtaatagttagttccgacgttgagatggattcgctgagaccggtagtggtcgtccgagtacacgacgtgtcgttaactggatacaggttaatttccacatcgatatagttaaacgtatttctgggtacgggttcgcatttatctgcggaagagacggtgtgagaatatgttccgagaccacacggagaacagatgacgtctccggatactccgtatcctattccacattttgtttgggaaacacatgccttgcatccggatgatcctttgagaagacaataatatccgggagagcattcacagattctattgtgagtcgtgttacacgatcgcgtcttccgttacaacttagacaagcgggtaaatgattattgcgagatgtgaaggtacccgaaccacacggcgtacatcgtgtgttagtcttgctatcgcataatctggaagcgtatgttcccggacacaaattatggcgtttgtattcgttgtctttacactttccatcggatggtgcatgcggtgctatatctcttccgtttattattatacatgagagaaacaatatatacgagtataatacggacttcatgatttaataatgtagtaatcgttgtcttgttcctgtttcctacttctccaatcatatagatattttctttctatcatggataatatttgtaatggttctttccgtacaacatactgtttagatgatattgcgcataatttccggaggcaaatacgatagtctagattgaccgatggtagactctaatttattgagtgctttgtcgacgagtttacttttacgctccatcgatagatggcactgttctatgagatcgtcgtacatgggaaatgaaatgtgactgtctgaatgtatggctttaagatagctgtgataccgtatacaggtcggtgtcggagattcgaatctctttgaggcgacttatgtcacgatgatggaatctatcttatcgaatgatatatttttcataaatacacttttatagtcctcgtttaaacagaatttactatgtagttccgcgaatgactcgtcccttaataggcagtaggctagtatcttttttacgtagtaatcgtcgtagggagagacatcttgtagaacaacgatttcgttttgttttctcttctgtaactgcttttctggatggccgtattgattatcgagcgtgatactcgctccatattccaataaccgctttgcaaattgtatattattgacatcgaccgcgtaatatagtagagttatcgatcatatctatatcatccatgtacttgcttagtatatcaaatacatctatcagtatggtttcataacagtgatacccgcaattattaaatctcgataatatcagaccgtacatacatagacggccattgttcgatacgtgatttacagccgcgtgtccatattttccacgataaaccttacgacgtttacatcgacgagattattattaacaaagtagtcgtgtagaggatagttgttgtccgttatctaacatgcatcgaacgaccatatcgccgtaatgtaagtagtttatcagtatggcttgtacgatggattcatcctgttgtctaaatctctttagaatgttatcgatgatgtagtggttatattctctggaatcgtacgaagtaatactacgcattacgtcgacaagagtatgacgtctctcaataagaagattaacgatttccatgtctacattatatggggttactctaaatcgcttgtttagataatacgcctctaatatagggctgacgtcgtatactctacacgtgtccacatcctttattaataataatttaacaatctctatatctatggttgagaaagaccagtagtattggatgggtaaagatcctccttcgtctctgccatggatggaaacattgttatcgatcaaacatttaattacatccttggatagagattgagattctctatgagacgatatatagtaatgaagagagttcttacacatatcactgtcgtacatacaggtacgaaatacgtaaccggtgctgtaacattctgatttaagaagccatagcaatacttctggtctcggattaggcgtcgttacgtatatatccaccaatccgagaccattgattgcataattcgtattcttggacggacgtatccgtttatccacaattaggtattttagcagacgtaagtcgatattatccgaatacagatcgaaatcatttatattcgacttgagttcgttagaggaatttgaatagctggatatcagtagatgcacaatctgagattttacgtatctatgcttactgtatactcctagcggagttaatccttcgttgtttctacaaagtctctcgactccgcgagagaacaatcttaatgtctgtatcgcatttattggagacgtaacaatgtagcgcattgtttcctcgtctatctatatgttttgataagttgtgacacgtttcaatttctagttttatttttttgtacgtcacatcttcatccagtagacgacatagaatagtgcactctctaccacaataatccatagctattctggtgctaattattcctatttcacgaaggcaatcattcctcataagatgataaaaagtgtagtggagatttagtatttagcagtgcggatatgatccaagagggtgagatagtcgttctcgttcagaatctttcgcagcataagtagtatgtcgatatacttatcgttgaagactctttataaaagtctatttgtttatatttattgcggatagcagtatttccctataaaaagtatacgtcctgtggtgtctttaatcatgtacatgaatggatggtttatgtagaccttcgtacgatataccatcgaaaagttaatcgtaaatactcctgtaacggccgatgcttctgtatactcctcattaacatctataaacgtcgtatgtagaaatttttctacagtgatagtttcattacacatcttgctaaaatctgcataatatccgaatatattagtaagtcctaaattttctaaaatcggtaccagattatacggttctgtcatttccactttaaactttggcatatacaagtctatacttttagtagataacataccacaccattttttaaatttttcatctgttatatttttttctatgttatatataccttctatgtcgtccggtagtataattaccatactagagtttccctcgtatggaatatcgataatagagaatcctccgaataattcattaatatgtacatattgcaagttattctcggtacccaccatcatatcaacgctggtaactatattcttagaaatataaaacttgtctgtatatgtaagatgtttagaaaatggatatttccacattgctttaaaatggacggcgctaacaactgtcatacgagtattaatggatagcggactagtcaataaggaattaattttaccatttgtcattgtcttaacccattcgttgattagttcctttgtttggttagcattattaaagtttacagtttgaaaatcgtcttttattttttgtaggaaggaggcgtggaactcgatactatcgctaccgtatattttatttgcggtagctagtgtcgcacaatacggaatatctacctccatgtcatcattattgtcatcgggtgtattctcattcatattctctatatattttgatagttgttcagctgtagaaccagctgctccatgatttagaatagataaagtagataaaatggaaactggagaaatcaaaacattttcatcagggtgttttaagattagttctttaaagatatccatggtatagacctaacgataacgatatatatcataaataaataatgttaaatttcaatttatgtttgtaccccgtattcatacttaacaaattggtattgcgtacacaatcaatcatattacataccattaataatgcaagcataaaaaattgttagtagatgtttctaaatataggttccgtaagcaaagaatataagaatgaagcggtaatgataaaatcaatcgttatctaaaatgatcatactcatttattttattctattatattaacacatacatttttaacagcaacacattcaatattgtattgttatttttatattatttacacaattaacaatatattattagtttatattactgaattaataatataaaattcccaatcttgtcataaacacacactgagaaacagcataaacacagaatccatcaaaaatgttgataaattatctgatgttgttgttcgctgctatgataatcagatcattcgccgatagtggtaacgctatcgaaacgacattgccagaaattacaaacgctacaacagatattccagctatcagattatgcggtccagagggagatggatattgtttacacggtgactgtatccacgctagagatattgacggtatgtattgtagatgctctcatggttatacaggcattagatgtcagcatgtagtattagtagactatcaacgttcagaaaacccaaacactacaacgtcatatatcccatctcccggtattatgcttgtattagtaggcattattatgtgttgtctattatctgtttataggttcactcgacgaactaaactacctatacaagatatggttgtgccataatttttataaatttttttatgagtatttttacaaaaatgtataaagtgtatgtcttatgtatatttataaaaatgctaagtatgcgatgtatctatgttatttgtatttatctaaacaatacctctacctctagatattatacaaaaattttttatttcggcatattaaagtaaaatctagttaccttgaaaatgaatacagtgggtggttccgtatcaccagtaagaacataatagtcaaatacagtatccgattgagattttgcatacaatactagtctagaaagaaatttgtaatcatcttctgtgacgggagtccatatatctgtatcatcgtctagtttatcagtgtcccatgctatattcctgttatcatcattagttaatgaaaataactctcgtgcttcagaaaagtcaaatattgtatccatacatacatctccaaaactatcgcttatacgtttatctttaacgatacctatacctagatggttatttactaacagacattttccagatctattgactataactcctatagtttccacatcaaccaagtaatgatcatctattgttatataacaataacataactcttttccatttttatcagtatgtatatctatatcaacgtcgtcgttgtagtgaatagtagtcattgatctattatatgaaacggatatgtctagaacggcaattgttttacgtccagttaacactttcgttgatttaaagtctagagtctttgcaaacataatatccttatccgactttatatttcctgtagggtggtataattttattttgcctccacatatcggtgtttccaaatatattactagacaatattccatatagttattagttaagggtacccaattagaacacgtacgcttattatcatcatttggatcgtatttcataaaagttattgtgttatcgatgtcaacacattctacattttttaatcgtctatatagtatttttctgatattttctataatatcagaattgtcttccatcggaagttgtatactatcggaatcagttacatgtttaaataattctctgatgtcattccttatacaatcaaattcattattaaacagtttaatagtctgtagacctttatcgtcgtaaatatccattgtcttattagttacgcttatttttatgtgtttttacgttgctttattatattttataagaatgattgtttgacgaatcacgagaactattaagacacattattaggtatatattataaaaaagtttttgattacgatgttataagaggaaagaggacacattaacatcatacatcaattaactacattcttataacatcgtaatcaaaagaattgcaattttgatgtataacaactgtcaatgggttatggaattgtatattacatattatacggtatgttggtaacgacaaataccggtcggtaattgtctgccggtgtaatagaattatatatatctatctattacaccggccttgtatacataataataagttgtggtagtatgatctccatatttataatttaggactttgtattcagtatttttggaatcataaaaaataaaaaaaagttttactaatttaaaatttaaaaagtatttacatttttttcactgtttagtcgcggatatggaattcgatcctgccaaaatcaatacatcatctatagatcatgtaacaatattacaatacatagatgaaccaaatgatataagactaacagtatgcattatccgaaatattatatcaatatcacaaaaataaatacacatttggctaatcaatttcgggcttggaaaaaacgtatcgccggaagggactatatgactaacttatctagagatacaggaatacaacaatcaaaacttactgaaactatacgtaactgtcaaaaaaatagaaacatatatggtctatatatacactacaatttagttattaattggataaccgatgtgattatcaatcaatattaagagggttggtaaattggtacatagctaataatacctatactccaaatacacccaataatacaacaaccatttctgagttggatatcatcaaaatactaaataaatacgaggacgtgtatagagtaagtaaagaaaaagaatgtggaatttgctatgaagttgtttactcaaaacgatagatactttggtttattggattcgtgtactcatatattttgcataacatgcatcaatatatggcatagaacacgaagagaaaccggtgcgtcggataattgtcctatatgccgtacccgttttagaaacataacaatgagcaagttctataagctagttaactaataaataaaaagtttaatttgttgacgacgtatgtcgttattttttctcgtataaaagattaatttgattctaatataatctttagtattggataaatatcaattcaaattaattccattagattatatcataaataaaaatagtagcacacaactacttcagcaaacattctttttataaatgccatctagcgtagcgaggacacaagtgaacctataattatcaaatttattagtatcagtcacatgaaggactttacgtagagtgacgattccactatctgtggtacgaacggtttcatcttctttgatgccatcacccagatgttctataaacttggtatcctcgtccgatttcatatcctttgccaaccaatacatatagctaaactcaggcatatgttccacacatcctgaacaatgaaattctccagaagatgttacaatgtctagatttggacatttggtttcaaccgcgttaacatatgagtgaacacacccatacatgaaagcgatgagaaataggattctcatcttgccaaaatatcactagaaaaaatttatttatcagttttaaaggtataaaaaatacttattgttgctcgaatattttgtatttgatggtatacggaagattagaaatgtaggtattatcatcaactgattctatggttttatgtattctatcatgtttcactattgcgttggaaataatatcatatgcttccacatatattttattttgttttaactcataatactcacgtaattctggattattggcatatctatgaataattttagctccatgatcagtaaatattaatgagaacatagtattaccacctaccattatttttttcatctcattcaattcttaattgcaaagatctatataatcattatagcgttgacttatggactctggaatcttagacgatgtacagtcatctataatcatggcatatttaatacattgttttatagcatagtcgttatctacgatgttagatatttctctcaatgaatcaatcacacaatctaatgtaggtttatgacataatagcattttcagcagttcaatgtttttagattcgttgatggcaatggctatacatgtatatccgttatttgatctaatgttgacatctgaaccggattctagcagtaaagatactagagattgtttattatatctaacagccttgtgaagaagtgtttctcctcgtttgtcaatcatgttaatgtctttaagataaggtaggcaaatgtttatagtactaagaattgggcaagcataagacatgtcacaaagacccttttttgtatgtataagtgtaaaaattataacatccatagttggatttacataggtgtccaatcgggatctctccatcatcgagataattgatggcatctcccttccttttttagtagatatttcatcgtgtaagaatcaatattaatatttctaaagtatccgtgtatagcctctttatttaccacagctccatattccactagagggatatcgccgaatgtcatatactcaattagtatatgttggaggacatccgagttcattgttttcaatatcaaagagatggtttccttatcatttctccatagtggtacaatactacacattattccgtgcggctttccattttccaaaaacaatttgaccaaatctaaatctacatctttattgtatctataatcactatttagataatcagccataattcctcgagtgcaacatgttagatcgtctatatatgaataagcagtgttatctattcctttcattaacaatttaacgatgtctatatctatatgagatgacttaatataatattgaagagctgtacaatagtttttatctataaaagacggcttgattccgtgattaattagacatttaacaacttccggacgcacatatgctctcgtatccgactctgaatacagatgagagatgatatacagatgcaatacggtaccgcaatttcgtagttgataatcatcatacgcgtatcagtactcgtcctcataaagaacactgcagccattttctatgaacaaatcaataattttagaaacaggatcattgtcattacataattttctataactgaacgatggttttcacatttaacactcaagtcaaatccatgttctaccaacacctttatcaagtcaacgtctacatttttggatttcatatagctgaatatattaaagttatttatgttgctaaatccagtggcttctagtagagccatcgctatatccttattaactttaacatgtctactatttgtgtattcttctaatggggtaagctgtctccaatttttgcgtaatggattagtgccactgtctagtagtagtttgacgacctcgacattattacaatgctcattaaaaaggtatgcgtgtaaagcattattcttgaattggttcctggtatcattaggatctctgtctttcaacatctgtttaagttcatcaagagccacctcctcattttccaaatagtcaaacattttgactgaatgagctactgtgaactctatacacccacacaactaatgtcattaaatatcatgtcaaaaacttgtacaattattaataaaaataatttagtgtttaaattttaccagttccagattttacacctccgttaatacctccattaaccccactggacgatcctcctccccacattccaccgccaccagatgtataagttttagatcctttattactaccatcatgtccatggataaagacactccacatgccgccactaccccctttagaagacatattaataagacttaaggacaagtttaacaataaaattaatcacgagtaccctactaccaacctacactattatatgattatagtttctatttttacagtaccttgactaaagtttctagtcacaagagcaatactaccaacctacactattatatgattatagtttctatttttataggaacgcgtacgagaaaatcaaatgtctaatttctaacggtagtgttgataaacgattgttatccgcggatacctcctctatcatgtcgtctattttcttactttgttctattaacttattagcattatatattatttgattataaaacttatattgcttattagcccaatctgtaaatatcggattattaacatatcgtttctttgtaggtttatttaacatgtacatcactgtaagcatgtccttaccatttattttaatttgacgcatatccgcaatttctttttcgcagtcggttataaattctatatatgatggatacatgctacatgtgtacttataatcgactaatatgaagtacttgatacatattttcagtaacgatttattattaccacctatgaataagtacctgtgatcgtctaggtaatcaactgttttcttaatacattcgatggttggtaatttactcagaataatttccaatatcttaatatataattctgctatttctgggatatatttatctgccagtataacacaaatagtaatacatgtaaacccatattttgttattatattaatgtctgcgccattatctattaaccattctactaggctgacactatgcgactcaatacaatgataaagtatactacatccatgtttatctattttgtttatatcatcaatatacggcttacaaagttttagtatcgataacacatccaactcacgcatagagaaggtagggaataatggcataatatttattaggttatcatcattgtcattatctacaactaagtttccattttttaaaatatactcgacaactttaggatctctattgccaaatttttgaaaatatttatttatatgcttaaatctatataatgtagctccttcatcaatcatacatttaataacattgatgtatactgtatgataagatacatattctaacaatagatcttgtatagaatctgtatatcttttaagaattgtggatattaggatattattacataaactattacacaattctaaaatataaaacgtatcacggtcgaataatagttgatcaactatataattatcgattttgtgatttttcttcctaaactgtttacgtaaatagttagatagaatattcattagttcatgaccactatagttactatcgaataacgcgtcaaatatttcccgtttaatatcgcatttgtcaagataataatagagtgtggtatgttcacgataagtataataacgcatctctttttcgtgtgaaattaaatagtttattacgtccaaagatgtagcataaccatcttgtgacctagtaataatataataatagagaactgttttacccattctatcatcataatcagtggtgtagtcgtaatcgtaatcgtctaattcatcatcccaattataatattcaccagcacgtctaatctgttctattttgatcttgtatccatactgtatgttgctacatgtaggtattcctttatccaataatagtttaaacacatctacattgggatttgatgttgtagcgtatttttctacaatattaataccatttttgatactatttatttctatacctttcgaaattagtaatttcaataagtctatattgatgttatcagaacatagatattcgaatatatcaaaatcattgatatttttatagtcgactgacgacaataacaaaatcacaacatcgtttttgatattattatttttcttggtaacgtatgcctttaatggagtttcaccatcatactcatataatggatttgcaccactttctatcaatgattgtgcactgctggcatcgatgttaaatgttttacaactatcatagagtatcttatcgttaaccatgattggttgttgatgctatcgcattttttggtttctttcatttcagttatgtatggatttagcacgtttgggaagcatgagctcatatgatttcagtactgtagtgtcagtactattagtttcaataagatcaatctctagatctatagaatcaaaacacgataggtcagaagataatgaatatctgtaggcttcttgttgtactgtaacttctggttttgttagatggttgcatcgtgctttaacgtcaatggtacaaattttatcctcgctttgtgtatcatattcgtccctactataaaattgtatattcagattatcatgcgatgtgtatacgctaacggtatcaataaacggagcacaccatttagtcataaccgtaatccaaaaatttttaaagtatatcttaacgaaagaagttgtgtcattgtctacggtgtatggtactagatcctcataagtgtatatatctagagtaatgtttaatttattaaatggttgataatatggatcctcgtgacaatttccgaagatggaaataagacataaacacgcaataaatctaattgcggacatggttactccttaaaaaaatacgaataatcaccttggctatttagtaagtgtcatttaacactatactcatattaatccatggactcataatctctatacgggattaacggatgttctatatacggggatgagtagttctcttctttaactttatactttttactaatcatatttagactgatgtatgggtaatagtgtttgaagagctcgttctcatcatcagaataaatcaatatctctgtttttttgttatacagatgtattacagcctcatatattacgtaatagaacgtgtcatctaccttattaactttcaccgcatagttgtttgcaaatacggttaatcctttgacctcgtcgatttccgaccaatctgggcgtataatgaatctaaactttaattgcttgtaatcattcgaaataatttttagtttgcatccgtagttatcccctttatgtaactgtaaatttctcaacgcgatatctccattaataatgatgtcgaattcgtgctgtatacccatactgaatggatgaacgaataccgacggcgttaatagtaatttactttttcatctttacatattgggtactagttttactatcataagtttataaattccacaagctactatggaataagccaaccatcttagtataccacacatgtcttaaagtttattaattaattacatgttgttttatatatatcgctacgaatttaaagagaaattagtttaggaagaaaaattatctatctacatcatcacgtctctgtattctacgatagagtgctactttaagatgcgacagatccgtgtcatcaaatatatactccattaaaatgattattccggcagcgaacttgatattggatatatcacaacctttgttaatatctacgacaatagacagcagtcccatggttccataaacagtgagtttatctttctttgaagagatattttgtagagatcttataaaactgtcgaatgacatcgcatttatatctttagctaaatcgtatatgttaccatcgtaatatctaaccgcgtctatcttaaacgtttccatcgctttaaagacgtttccgatagatggtctcatttcatcagtcatactgagccaacaaatataatcgtgtataacatctttgatagaatcagactctaaagaaaacgaatcggctttattatacgcattcatgataaacttaatgaaaaatgtttttcgttgtttaagttggatgaatagtatgtcttaataattgttattatttcattaattaatatttagtaacgagtacactctataaaaacgagaatgacataactaatcataactagttatcaaagtgtctaggacgcgtaattttcatatggtatagatcctgtaagcattgtctgtattctggagctattttctctatcgcattagtgagttcagaatatgttataaatttaaatcgaataacgaacataactttagtaaagtcgtctatattaactcttttattttctagccatcgtaataccatgtttaagatagtatattctctagttactacgatctcatcgttgtctagaatatcacatactgaatctacatccaattttagaaattggtctgtgttacatatctcttctatattattgttgatgtattgtcgtagaaaactattacgtagaccattttctttataaaacgaatatatagtactccaattatctttaccgatatatttgcacacataatccattctctcaatcactacatctttaagattttcgttgttaagatatttggctaaactatataattctattagatcatcaacagaatcagtatatatttttctagatccaaagacgaactctttggcgtcctctataatattcccagaaaagatattttcgtgttttagtttatcgagatctgatctgttcatatacgccatgattgtacggtacgttatgataaccgcataaaataaaaatccattttcatttttaaccaatactattcataattgagattgatgtaatactttgttactttgaacgtaaagacagtacacggatccgtatctccaacaagcacgtagtaatcaaatttggtgttgttaaacttcgcaatattcatcaatttagatagaaacttatactcatcatctgttttaggaatccatgtattattaccactttccaacttatcattatcccaggctatgtttcgtccatcatcgttgcgcagagtgaataattcttttgtattcggtagttcaaatatatgatccatgcatagatcggcaaagctattgtagatgtgatttttcctaaatctaatataaaactcgtttactagcaaacactttcctgatttatcgaccaagacacatatggtttctaaatctatcaagtggtggggatccatagttatgacgcagtaacatatattattacattcttgactgtcgctaatatctaaatatttattgttatcgtattggattctgcatatagatggcttgtatgtcaaagatatagaacacataaccaatttatagtcgcgctttacattctcgaatctaaagttaagagatttagaaaacattatatcctcggatgatgttatcactgtttctggagtaggatatattaaagtctttacagatttcgtccgattcaaataaatcactaaataatatcccacattatcatctgttagagtagtatcattaaatctattatattttatgaaagatatatcactgctcacctctatatttcgtacatttttaaactgtttgtataatatctctctgatacaatcagatatatctattgtgtcggtagacgataccgttacatttgaattaatggtgttccattttacaacttttaacaagttgaccaattcatttctaatagtatcaaactctccatgattaaatattttaatagtatccattttatatcactacggacacaaagtagctgacataaaccattgtataatttttatgttttatgtttattagcgtacacattttggaagttccggcttccatgtatttcctggagagcaagtagatgatgaggaaccagatagtttatatccgtacttgcacttaaagtctacattgtcgttgtatgagtatgatcttttaaacccgctagacaagtatccgtttgatattgtaggatgtggacatttaacaatctgacacgtgggtggatcggaccattctcctcctgaacacaggacactagagttaccaatcaacgaatatccactattgcaactataagttacaacgctcccatcggtataaaaatcctcgtatccgttatgtcttccgttggatatagatggaggggattggcatttaacagattcacaaataggtgcctcgggattccataccatagatccagtagatcctaattcacaatacgatttagattcaccgatcaactgatatccgctattacaagagtacgttatactagagccaaagtctactccaccaatatcaagttggccattatcgatatctcgaggcgatgggcatctccgtttaatacattgattaaagagtgtccatccagtacctgtacatttagcatatataggtcccattttttgctttctgtatccaggtagacatagatattctatagtgtctcctatgttgtaattagcattagcatcagtctccacactattcttaaatttcatattaatgggtcgtgacggaatagtacagcatgatagaacgcatcctattcccaacaatgtcaggaacgtcacgctctccaccttcatatttatttatccgtaaaaatgttatcctggacatcgtacaaataataaaaagcccatatatgttcgctattgtagaaattgtttttcacagttgctcaaaaacgatggcagtgacttatgagttacgttacactttggagtctcatctttagtaaacatatcataatattcgatattacgagttgacatatcgaacaaattccaagtatttgattttggataatattcgtattttgcatctgctataattaagatataatcaccgcaagaacacacgaacatctttcctacatggttaaagtacatgtacaattctatccatttgtcttccttaactatatatttgtatagataattacgagtctcgtgagtaattccagtaattacatagatgtcgccgtcgtactctacagcataaactatactatgatgtctaggcatgggagacttttttatccaacgatttttagtgaaacattccacatcgtttaatactacatatttctcatacgtggtataaactccacccattacatatatatcatcgtttacgaataccgacgcgcctgaatatctaggagtaattaagtttggaagtcttatccatttcgaagtgccgtgtttcaaatattctgccacacccgttgaaatagaaaattctaatcctcctattacatataactttccatcgttaacacaagtactaacttctgattttaacgacgacatattagtaaccgttttccattttttcgttttaagatctacccgcgatacggaataaacatgtctattgttaatcatgccgccaataatgtatagacaattatgtaaaacatttgcattatagaattgtctatctgtattaccgactatcgtccaatattctgttctaggagagtaatgggttattgtggatatataatcagagtttttaatgactactatattatgttttataccatttcgtgtcactggctttgtagatttggatatagttaatcccaacaatgatatagcattgcgcatagtattagtcataaacttgggatgtaaaatgttgatgatatctacatcgtttggatttttatgtatccactttaataatatcatagctgtaacatcctcatgatttacgttaacgtcttcgtgggataagatagttgtcagttcatcctttgataattttccaaattctggatcggatgtcaccgcagtaatattgttgattatttctgacatcgacgcattatatagttttttaattccatatcttttagaaaagttaaacatccttatacaatttgtgaaattaatattatgaatcatagtttttacacatagatctactacaggcggaacatcaattattatggcagcaactagtatcatttctacattgtttatggtgatgtttatcttcttccagcgcatatagtctaatagcgattcaaacgcgtgatagtttataccattcaatataatcgcttcatcctttagatggtgatcctgaatgcgtttaaaaaaattatacggagacgccgtaataatttccttattcacttgtataatttccccattgatagaaaatattacgctttccattcttaaagtactataagtaattatagtataatgtaaacgtttatatattcaatatttttataaaaatcattttgacattaattcctttttaaatttccgtctatcatctatagaaacgtattctatgaatttataaaatgcttttacgtgtcctatcgtaggcgatagaaccgctaaaaagcctatcgaatttctacaaaagaatctgttatatggtatagggagagtataaaacattaaatgtccgtacttattaaagtattcagtagccaatcctaactctttcgaatacttattaatggctcttgttctgtacgaatctatttttttgaacaacggacctagtggtatatcttgttctatgtatctaaaataatgtctgactagatccgttagtttaatatccgcagtcatcttgtctagaatggcaaatctaactgcgggtttaggctttagtttagtttctatatctacatctatgtctttatctaacaccaaaaatataatagctaatattttattacaatcatccggatattcttctacgatctcactaactaatgtttctttggttatactagtatagtcactatcggacaaataaagaaaatcagatgatcgatgaataatacatttaaattcatcatctgtaagatttttgagatgtctcattagaatattattagggttagtactcattatcattcggcagctattacttattttattatttttcaccatatagatcaatcattagatcatcaaaatatgtttcaatcatcctaaagagtatggtgaatgactcttcccatctaatttctgaacgttcaccaatgtctctagccactttggcactaatagcgatcattcgcttagcgtcttctatattattaactggttgatttaatctatctagcaatggaccgtcggacagcgtcattctcatgttcttaatcaatgtacatacatcgccgtcatctaccaattcatccaacaacataagctttttaaaatcatcattataataggtttgatcgttgtcatttctccaaagaatatatctaataagtagagtcctcatgcttagttaacaactattttttatgttaaatcaattagtacaccgctatgtttaatacttattcatattttagtttttaggattgagaatcaatacaaaaattaatgcatcattaattttagaaatacttagtttccacgtagtcaatgaaacatttgaactcatcgtacaggacgttctcgtacaggacgtaactataaaccggtttatatttgttcaagatagatacaaatccgataactttttttacgaattctacgggatccactttaaaagtgtcataccgggttctttttatttttttaaacagatcaatggtgtgatgttgattaggtcttttacgaatttgatatagaatagcgtttacatattctccataatggtcaatcgccatttgttcgtatgtcataaattctttaattatatgacactgtgtattatttagttcatccttgttcattgttaggaatctatccaaaatggcaattatactagaactataggtgcgttgtatacacatattgatgtgtctgtttatacaatccatgatatttggatccatgctactaccttcgggtaaaattgtagcatcatataccatttctagtactttaggttcattattatccattgcagaggacgtcatgatcgaatcataaaaaaatatattatttttatgttattttgttaaaaataatcatcgaatacttcgtaagatactccttcatgaacataatcagttacaaaacgtttatatgaagtaaagtatctacgatttttacaaaagtccggatgcataagtacaaagtacgcgataaacggaataataatagatttatctagtctatctttttctatagctttcatagttagatacatggtctcagaagtaggattatgtaacatcagcttcgataaaatgactgggttatttagtcttacacattcgctcatacatgtatgaccgttaactacagagtctacactaaaatgattgaacaatagatagtctaccattgtttcgtattcagatagtacagcgtagtacatggcatcttcacaaattatatcattgtctaatagatatttgacgcatcttatggatcccacttcaacagccatcttaaaatcatattgctttcctttatcattaataatttctagaacatcatctctatcataaaagatacaaatattaactgtttgatccgtaataacattgctagtcaatagcaatttgttaataagatgcgctgggctcaatgtcttaataagaagtgtaagaggactatctccgaatttgttttgtttattaacatccgttgatggaagtaaaagatctataatgtctacattcttgactgttttagagcatacaatatggagaggtgtatttccatcatgatctggttttgagggactaattcctagtttcatcatccatgagattgtagaagcttttggattgtctgacataagatgtctatgaatatgatttttgccaaatttatccactatcctggcttcgaatccgatggacattatttttttaaacactctttctgaaggatctgtacacgccaacaacggaccacatccttcttcatcaaccgagttgttaatcttggctccatactgtaccaataaatttattctctctatgacttcatcatctgttcccgagagataatatagaggtgttttatgctgtttatcacacgcgtttggatctgcgccgtgcgtcagcagcatcgcgactattctattattattaattttagaagctatatgcaatggataatttccatcatcatccgtctcatttggagagtatcctctatgaagaagttcttcgacaaatcgttcatctagtcctttaattccacaatacgcatgtagaatgtgataattatttccagaaggttcgatagcttgtagcatattcctaaatacatctaaatttttactattatatttggcataaagagatagataatactcggccgacataatgttgtccattgtagtataaaaattaatatttctatttctatttctgtatatttgcaacaatttactctctataacaaatatcataacttagtttttttatgtcaagaaggcactggtttagttcatctataaatgtcacgccataactaccacgcatgccatactcagaattatgataaagatatttatccttggggtgtaggtaatggggattaatctttgttggatcagtctctaagttaacacatgtcacacatgatccatttatagttatatcacacgatgatgatttatgaattgattccggaagatcgctatcgtattttgtggttccacaattcatttccatacatgttattgtcacactaatattatgatgaactttatctagccgctgagtggtaaacaacagaacagatagtttattatctttaccaacaccctcagccgctgccacaaatctctgatccgtatccatgatggtcatgtttatttctagtccgtatccagtcaacactatgttagcatttctgtcgatatagctttcactcatatgacactcaccaataatagtagaattaatgtcgtaatttacaccaatagtgagttcggcggcaaagtaccaataccggtaatcttgtcgaggaggacatatagtattcttgtattctaccgaatacccgagagatgcgatacaaaagagcaagactaatttgtaaaccatcttactcaaaatatgtaacaatagtacgatgcaatgagtaagacaataggaaatctatcttatatacacataattattctatcaattttaccaattagttagtgtaatgttaacaaaaatgtgggagaatctaattagtttttctttacacaattgacgtacatgagtctgagttccttgtttttgctaattatttcatccaatttattattcttgacgatatcgagatcttttgtataggagtcaaacttgtattcaacatgcttttctataatcattttagctatttcggcatcatccaatagtacattttccagattagcagaatagatattaatgtcgtatttgaacagagcctgtaacatctcaatgtctttattatctatagccaatttaatgtccggaatgaagagaagggaattattggtgtttgtcgacgtcatatagtcgagcaagagaatcatcatatccacgtgtccattttttatagtgatgtgaatacaactaaggagaatagccagatcaaaagtagatggtatctctgaaagaaagtaggaaacaatacttacatcattaagcatgacggcatgataaaatgaagttttccatccagttttcccatagaacatcagtctccaatttttcttaacaaacagttttaccgtttgcatgttaccactatcaaccgcataatacaatgcggtgtttcccttgtcatcaaattgtgaatcatccagtccactgaatagcaaaatctttactattttggtatcttccaatgtggctgcctgatgtaatggaaattcattctctagaagatttttcaatgctccagcgttcaacaacgtacatactagacgcacgttattatcagctattgcataatacaaggcactatgtccatggacatccgccttaaatgtatctttactagagagaaagcttttcagctgcttagacttccaagtattaattcgtgacagatccatgtctgaaacgagacgctaattagtgtatattttttcattttttataattttgtcatattgcaccagaattaataatatctttaatagatctgattagtagatacatggctatcgcaaaacaacatatacacatttaataaaaataatatttattaagaaaattcagatttcacgtacccatcaatataaataaaataatgattccttacaccgtacccatattaaggagattccaccttacccataaacaatataaatccagtaatatcatgtctgatgatgaacacaaatggtgtattaaattccagtttttcaggagatgatctcgccgtagctaccataatagtagatgcctctgctacagttccttgttcgtcgacatctatctttgcattctgaaacattttataaatatataatgggtccctagtcatatgtttaaacgacgcattatctggattaaacatactaggagccatcatttcggctatcgacttaatatccctcttattttcgatagaaaatttagggagtttaagattgtacactttattccctaattgagacgaccaatagtctaattttgcagccgtgatagaatctgtgaaatgggtcatattatcacctattgccaggtacatactaatattagcatccttatacggaaggcgtaccatgtcatattctttgtcatcgattgtgattgtatttccttgcaatttagtaactacgttcatcatgggaaccgttttcgtaccgtacttattagtaaaactagcattgcgtgttttagtgatatcaaacggatattgccatatacctttaaaatatatagtattaatgattgcccatagagtattattgtcgagcatattagaatctactacattagacataccggatctacgttctactatagaattaattttattaaccgcatctcgtctaaagtttaatctatataggccgaatctatgatattgttgataatacgacggtttaatgcacacagtattatctacgaaactttgataagttagatcagtgtacgtatatttagatgttttcagcttagctaatcctgatattaattctgtaaatgctggacccagatctctttttctcaaatccatagtcttcaataattctattctagtattacctgatgcaggcaatagcgacataaacatagaaaacgaataaccaaacggtgagaagacaatattatcatcttgaatatttttatacgctactataccggcattggtaaatccttgtagacgataggcggacgctgaacacgctaacgatagtatcaataacgcaatcatgattttatggtattaataattaaccttatttttatgttcggtataaaaaaattattgatgtctacacatccttttgtaattgacatctatatatccttttgtataatcaactctaatcactttaacttttacagttttccctaccagtttatccctatattcaacatatctatccatatgcatcttaacactctctgccaagatagcttcagagtgaggatagtcaaaaagataaatatatagagcataatcattctcgtatactctgccctttattacatcacccgcattgggcaacgaataacaaaatgcaagcatcttgttaacgggctcgtaaattgggataaaaattatgtttttattgtcttatatctattttattcaagagaatattcaggaatttctttttccggttgtatctcgtcgcagtatatatcatttgtacattgtttcatattttttaatagtttacaccttttagtaggactagtatcgtacaattcatagctgtattttgaattccaatcacgcataaaaatatcttccaattgttgacgaagacctaatccatcatccggtgtaatattaatagatgctccacatgtatccgtaaagtaatttcctgtccaatttgaggtacctatataggccgttttatcggttaccatatatttggcatggtttaccctagaatacggaatgggaggatcagcatctggtacaataaatagctttacttctatatttatgtttttagattttagcatagcgatagatcttaaaaagtttctcatgataaacgaagatcgttgccagcaactaatcaatagcttaacggatacttgtctgtctatagcggatcttcttaattcatcttctatataaggccaaaacaaaattttacccgccttcgaataaataatagggataaagttcataacagatacataaacgaatttactcgcatttctaatacatgacaataaagcggttaaatcattggttctttccatagtacatagttgttgcggtgcagaagcaataaatacagagtgtggaacgccgcttacgttaatactaagaggatgatctgtattataatacgacggataaaagtttttccaattatatggtagattgttaactccaagataccagtatacctcaaaaatttgagtgagatccgctgccaagttcctattattgaagatcgcaatacccaattccttgacctgagttagtgatctccaatccatgttagcgcttcctaaataaatatgtgtattatcagatatccaaaattttgtatgaagaactcctcctaggatatttgtaatatctatgtatcgtacttcaactccggccatttgtagtctttcaacatcctttaatggtttgttagatttattaacggctactctaactcgtactcctcttttgggtaattgtacaatctcgtttaatattatcgtgccgaaattcgtacccacttcatccgataaactccaataaaaagatgatatatctagtgtttttgtggtattggatagaatttccctccacatgttaaatgtagacaaatatactttatcaaattgcatacctataggaatagtttctgtaatcactgcgattgtattatccggattcattttatttgttaaaagaataatcctatatcacttcactctattaaaaatccaagtttctatttctttcatgactgattttttaacttcatccgtttccttatgaagatgatgtttggcaccttcataaatttttatttctctattacaatttgcatgttgcatgaaataatatgcacctaaaacatcgctaatcttattgtttgttccctggagtatgagagtcggggggtgttaatcttggaaattatttttctaaccttgttggtagccttcaagacctgactagcaaatccagccttaattttttcatgattgactaatgggtcgtattggtatttataaactttatccatatctctagatactgattctggacatagctttccgactggcgcatttggtgtgatggttcccataagtttggcagctagcagattcagtcttgaaacagcatctgcattaactagaggagacattagaatcattgctgtaaacaagtttggattatcgtaagaggctagctcccatggaatgacccaataagtagatttaatagttaccacgtgctgtaccaaagtcatcaatcatcattttttcaccattacttcttccatgtccaatatgatcatgtgagaatactaaaattcctaacgatgatatgttttcagctagttcgtcataacgtccagaatgtttaccagctccatgacttatgaatactaatgccttaggatatgtaataggtttccaatatttacaatatatgtaatcattgtccagattgaacatacagtttgcactcatgattcacgttatataactatcaatattaacagttcgtttgatgatcatattatttttatgttttattgataattgtaaaaacatacaattaaatcaatatagaggaaggagacggctactgtcttttgtaagatagtcatggcgactaaattagattatgaggatgctgttttttactttgtggatgatgataaaatatgtagtcgcgactccatcatcgatctaatagatgaatatattacgtggagaaatcatgttatagtgtttaacaaagatattaccagttgtggaagactgtacaaggaattgatgaagttcgatgatgtcgctatacggtactatggtattgataaaattaatgagattgtcgaagctatgagcgaaggagaccactacatcaattttacaaaagtccatgatcaggaaagtttattcgctaccataggaatatgtgctaaaatcactgaacattggggatacaaaaagatttcagaatctagattccaatcattgggaaacattacagatttgatgaccgacgataatataaacatcttgatactttttctagaaaaaaaattgaattgatgatataggggtcttcataacgcataattattacgttagcattctatatccgtgttaaaaaaaattatcctatcatgtatttgagagttttatatgtagcaaacatgatagctgtgatgccaataagctttagatattcacgcgtgctagtgttagggatggtattatctggtggtgaaatgtccgttatataatctacaaaacaatcatcgcatatagtatgcgatagtagagtaaacatttttatagtttttactggattcatacatcgtctacccaattcggttataaatgaaattgtcgccaatcttacacccaaccccttgttatccattagcatagtattaacttcgttatttatgtcataaactgtaaatgattttgtagatgccatatcatacatgatattcatgtccctattataatcattactaactttatcacaatatatgttgataatatctatatatgatctagtctttgtgggcaactgtctatacaagtcgtctaaacgttgtttactcatatagtatcgaacagccatcattacatggtcccgttccgttgatagataatcgagtatgttagtggacttgtcaaatctatataccatattttctggaagtggatatacatagtcgtgatcaacattattgctagcctcatcttctatatcctgtactataccattatctatatcatctacataatctatgatattattacacataaacatcgacaacatactattgtttattatctaagtcctgttgatccaaacccttgatctcctctatttgtactatctagagattgtacttcttccagttctggataatatatacgttgatagattagctgagctattctatctccagtatttacattaaacgtacattttccattattaataagaatgactcctatgtttcccctataatcttcgtctattacaccacctcctatatcaatgccttttagtgacagaccagacctaggagctattctaccatagcagaacttaggcatggacatactaatatctgtcttaattaactgtctttctcctggagggatagtataatcgtaagcgctatacaaatcatatccggcagcacccggcgattgcctagtaggagatttagctctgttagtttccttaacaaatctaactggtgagttaatattcatgttgaacataaaactaatattttatttcaaaattatttaccatcccatatattccatgaataagtgtgatgattgtacacttctatagtatctatatacgatccacgataaaatcctcctatcaatagcagtttattatccactatgatcaattctggattatccctcggataaataggatcatctatcagagtccatgtattgctggattcacaataaaattccgcatttctaccaaccaagaataaccttctaccgaacactaacgcgcatgatttataatgaggataataagtggatggtccaaactgccactgatcatgattgggtagcaaatattctgtagttgtatcagtttcagaatgtcctcccattacgtatataacattgtttatggatgccactgctggattacatctaggtttcagaagactcggcatattaacccaagcagcatccccgtggaaccaacgctcaacagatgtgggatttggtagacctcctactacgtataatttattgttagcgggtatcccgctagcatacagtctggggctattcatcggaggaattggaatccaattgtttgatatataatttacagctatagcattgttatgtatttcattgttcatccatccaccgatgagatatactacttctccaacatgagtacttgtacacatatggaatatatctataatttgatccatgttcataggatactctatgaatggatacttgtatgatttgcgtggttgtttatcacaatgaaatattttggtacagtctagtatccattttacattatttatacctctgggagaaagataatttgacctgattacatttttgataaggagtagcagatttcctaatttatttcttcgcctcatataccacttaatgacaaaatcaactacataatcctcatctggaacatttagttcatcgctttctagaataagtttcatagatagataatcaaaattgtctatgatgtcatcttccagttccaaaaagtgtttggcaataaagtttttagtatgacataagagattggatagtccgtattctatacccatcatgtaacactcgacacaatattcctttctaaaatctcgtaagataaagtttatacaagtgtagatgataaattctacagaggttaatatagaagcacgtaataaattgacgacgttatgactatctatatatacctttccagtatatgagtaaataactatagaagttaaactgtgaatgtcaaggtctagacaaacccttgtaactggatctttatttttcgtgtatttttgacgtaaatgtgtgcgaaagtaaggagataactttttcaatatcgtagaattgactattatattgcctcctatggcatcaataattgttttgaatttcttagtcatagacaatgctaatatattcttacagtacacagtattgacaaatatcggcatttatgtttctttaaaagtcaacatctagagaaaaatgattatctttttgagacataactcccattttttggtattcacccacacgtttttcgaaaaaattagtttttccttccaatgatatattttccatgaaatcaaacggattggtaacattataaatttttttaaatcccaattcagaaatcaatctatccgcgacgaattctatatatgttttcatcatttcacaattcattcctataagtttaactggaagagccgcagtaagaaattcttgttcaatggatactgcatctgttataatagatctaacggtttcttcactcggtggatgcaataaatgtttaaacatcaaacatgcgaaatcgcagtgcagaccctcgtctctactaattagttcgttggaaaacgtgagtccgggcattaggccacgctttttaagccaaaatatggaagcgaatgatccagaaaagaaaattccttctactgcagcaaaggcaataagtctctctccataaccggcgctgtcatgtatccacttttgagcccaatcggccttcttttttacacaaggcatcgtttctatggcattaaagagatagtttttttcattactatctttaacataagtatcgatcaaaagactatacatttccgaatgaatgttttcaatggccatctgaaatccgtagaaacatctagcctcggtaatctgtacttctgtacaaaatcgttccgccaaattttcattcactattccgtcactggctgcaaaaaacgccaatacatgttttataaaatatttttcgtctggtgttagtttattccaatcattgatatctttagatatatctacttcttccactgtccaaaatgatgcctctgcctttttatacatgttccagatgtcatgatattggattgggaaaataacaaatctatttggatttggtgcaaggatgggttccataactaaattaacaataacaataaattttttttcagttatctatatgcctgtacttggattttttgtacatcgatatcgccgcaatcactacaataattacaagtattattgatagcattgttattagtactatcataattaaattatctacattcatgggtgctgaataatcgttattatcatcattatcattttgtaattgtgacatcatactagataaatcgtttgcgagattgttgtgggaagcgggcatggaggatgcattatcattattatttaacgccttccatttggattcacaaatgttacgcacattcaacattttatggaaactataattttgtgaaaacaaataacaagaaaactcgtcatcgttcaaatttttaacgatagtaaaccgattaaacgtcgagctaatttctaacgctagcgactctgttggatatgggtttccagatatatatcttttcagttcccctacgtatctataatcatctgtaggaaatggaagatatttccatttatctactgttcctaatatcatatgtggtggtgtagtagaaccattaagcgcgaaagatgttatttcgcatcgtattttaacttcgcaataatttctggttagataacgcactctaccagtcaagtcaatgatattagcctttacagatatattcatagtagtcgtaacgatgactccatcttttagatgcgatactcctttgtatgtaccagaatcttcgtacctcaaactcgatatatttaaacaagttaatgagatattaacgcgttttatgaatgatgatatataaccagaagttttatcctcggtggctagcgctataaccttatcattataataccaactagtgtgattaatatgtgacacgtcagtgtgggtacaaatatgtacattatcgtctacgtcgtattcgatacatccgcatacagccaacaaatataaaatgacaaatactctaacgccgttcgtacccatcttgatgcggtttaataaatgttttgatttcaatttattgtaaaaaaagattcggttttatactgttcgatattctcattgcttatattttcatctatcatctccacacagtcaaatccgtggttagcatgcacctcatcaaccggtaaaagactatcggactcttctatcattataactctagaatatttaatttggtcattattaatcaagtcaattatcttatttttaacaaacgtgagtattttactcattttttataaaaacttttagaaatatacagactctatcgtgtgtctatatcttctttttatatccaatgtatttatgtctgatttttcttcatttatcatatataatggtccaaattctacacgtgcttcggattcatccagatcattaaggttcttataattgtaacatccttctcttccctcttctacatcttccttcttattcttattcttagcgtcacagaatctaccacagcaggatcccatgacgagcgtcatattaaactaatccattttcaattataatatatgattagtaatgaccattaaaataaaaaatattcttcataaccggcaagaaagtgaaaagttcacattgaaactatgtcagtagtatacatcatgaaatgatgatatatatatactctattttggtggaggattatatgatataattcgtggataatcatttttaagacacatttctttattcgtaaatcttttcacgttaaatgagtgtccatattttgcaatttcttcatatgatggcggtgtacgtggacgaggctgctcctgttcttgttgtggtcgccgactgtcgtgtctgcgtttagatccctccattatcgcgattgcgtagatggagtactattttataccttgtaattaaatttttttattaattaaacgtataaaaacgttccgtatctgtatttaagagccagatttcgtctaatagaacaaatagctacagtaaaaataactagaataattgctacacccactagaaaccacggatcgtaatacggcaatcggttttcgataataggtggaacgtatattttatttaaggacttaacaattgtctgtaaaccacaatttgcttccgcggatcctgtattaactatctgtaaaagcatatgttgaccgggcggagccgaacattctccgatatctaatttctgtatatctataatattattaacctccgcatacgcattacagttcttttctagcttggataccgcactaggtacatcgtctagatctattcctatttcctcagcgatagctcttctatccttttccggaagcaatgaaatcacttcaataaatgattcaaccatgagtgtgaaactaagtcgagaattactcatgcatttgttagttattcggagcgcgcaatttttaaactgtcctataacctctcctatatgaatagcacaagtgacattagtagggatagaatgttgagctaatttttgtaaataactatctataaaaagattatacaaagttttaaactctttagtttccgccatttatccagtctgagaaaatgtctctcataataaatttttccaagaaactaattgggtgaagaatggaaacctttaatctatatttatcacagtctgttttggtacacatgatgaattcttccaatgccgtactaaattcgatatctttttcgatttctggatatgtttttaataaagtatgaacaaagaaatggaaatcgtaataccagttatgtttaactttgaaattgttttttattttcttgttaatgattccagccacttgggaaaagtcaaagtcgtttaatgccgatttaatacgttcattaaaaacaaactttttatcctttagatgaattattattggttcattggaatcaaaaagtaagatattatcgggtttaagatctgcgtgtaaaaagttgtcgcaacagggtagttcgtagattttaatgtataacagagccatctgtaaaaagataaactttatgtattgtaccaaagatttaaatcctaatttgatagctaactcggtatctactttatctgccgaatacagtgctaggggaaaaattataatgtttcctctttcatattcgtagttagttctcttttcatgttcgaaaaagtgaaacatgcggttaaaatagtttataacattaatattactgttaataactgccggataaaagtgggatagtaatttcacgaatttgatactgtcctttctctcgttaaacgcctttaaaaaaactttagaagaatatctcaatgagagttcctgaccatccatagtttgtatcaataatagcaacatatgaagaacacgtttatacagagtatgtaaaaatgttaatttatagtttaatcccatggcccacgcacacacgattaattttttttcatctccctttagattgttgtatagaaatttgggtactgtgaactccgccgtagtttccatgggactatataattttgtggcctcgaatacaaattttactacatagttatctatcttaaagactataccatatcctcctgtagatatgtgataaaaatcgtcgtttataggataaaatcgtttatccttttgttggaaaaaggatgaattaatgtaatcattctcttctatctttagtagtgtttccttattaaaattcttaaaataatttaacaatctaactgacggagcccaattttggtgtaaatctaattgggacattatattgttaaaatacaaacagtctcctaatataacagtatctgataatctatggggagacatccattgatattcaggggatgaatcattggcaacacccatttattgtacaaaaagccccaatttacaaacgaaagtccaggtttgatagagacaaacaattaactattttgtctctgtttttaacacctccacagtttttaatttctttagtaatgaaattattcacaatatcagtatcttctttatctaccagagattttactaacttgataaccttggctgtctcattcaatagggtagtaatatttgtatgtgtgatattgatatctttttgaattgtttcttttagaagtgattctttgatggtgccagcatacgaattacaataatgcagaaactcggttaacatgcaggaattatagtaagccaattccaattgttgcctgtgttgtattagagtgtcaatatgagcaatggtgtccttgcgtttctctgatagaatgcgagcagcgattttggcgttatcatttgacgatatttctggaatgacgaatcctgtttctactaactttttggtaggacaaagtgaaacaatcaagaagatagcttctcctcctatttgtggaagaaattgaactcctctagatgatctactgacgatagtatctccttgacagatattggaccgaattacagaagtacctggaatgtaaagccctgaaaccccctcattttttaagcagattgttgccgtaaatcctgcactatgcccaagatagagagctcctttggtgaatccatctctatgtttcagtttaaccaagaaacagtcagctggtctaaaatttccatctctatctaatacagcatctaacttgatgtcaggaactatgaccggtttaatgttatatgtaacattgagtaaatccttaagttcataatcatcactgtcatcagttatgtacgatccaaacaatgtttctaccggcatagtggatacgaagatgctatccatcagaatgtttccctgattagtattttctatatagctattcttctttaaacgattttccaaatcagtaactatgttcatttttttaggagtaggacgcctagccagtatggaagaggattttctagatcctctcttcaacatctttgatctcgatggaatgcaaaaccccatagtgaaacaaccaacgataaaaataatattgtttttcactttttataattttaccatctgactcatggattcattaatatctttataagagctactaacgtataattctttataactgaactgagatatatacaccggatctatggtttccataattgagtaaatgaatgctcggcaataactaatggcaaatgtatagaacaacgaaattatactagagttgttaaagttaatattttctatgagctgttccaataaattatttgttgtgactgcgttcaagtcataaatcatcttgatactatccagtaaaccgtttttaagttctggaatattatcatcccattgtaaagcccctaattcgactatcgaatatcctgctctgatagcagtttcaatatcgacggacgtcaatactgtaataaaggtggtagtattgtcatcatcgtgataaactacgggaatatggtcgttagtaggtacggtaactttacacaacgcgatatataactttccttttgtaccatttttaacgtagttgggacgtcctgcagggtattgttttgaagaaatgatatcgagaacagatttgatacgatatttgttggattcctgattattcactataatataatctagacagatagatgattcgataaatagagaaggtatatcgttggtaggataatacatccccattccagtattctcggatactctattgatgacactagttaagaacatgtcttctattctagaaaacgaaaacatcctacatggactcattaaaacttctaacgctcctgattgtgtctcgaatgcctcgtacaaggatttcaaggatgccatagattctttgaccaacgatttagaattgcgtttagcatctgatttttttattaaatcgaatggtcggctctctggtttgctaccccaatgataacaatagtcttgtaaagataaaccgcaagaaaatttatacgcatccatccaaataaccctagcaccatcggatgatattaatgtattattatagattttccatccacaattattgggccagtatactgttagcaacggtatatcgaatagattactcatgtaacctactagaatgatagttcgtgtactagtcataatatctttaatccaatctaaaaaatttaaaattagattttttacactgttaaagttaacaaaagtattacccgggtacgtggatatcatatatggcattggtccattatcagtaatagctccataaactgatacggcgatggtttttatatgtgtttgatctaacgaggaagaaattcgcgcccacaattcatctctagatatgtatttaatatcaaacggtaacacatcaatttcgggacgcgtatatgtttctaaatttttaatccaaatataatgatgacctatatgccctattatcatactgtcaactatagtacacctagggaacttacgatacatctgtttcctataatcgttaaattttacaaatctataacatgctaaaccttttgacgacagccattcattaatttctgatatggaatctgtattctcgataccgtatcgttctaaagccagtgctatatctccctgttcgtgggaacgctttcgtataatatcgatcaacggataatctgaagtttttggagaataatatgactcatgatctatttcgtccataaacaatctagacataggaattggaggcgatgatcttaattttgtgcaatgagtcgtcaatcctataacttctaatcttgtaatattcatcatcgacataatactatctatgttatcatcgtatattagtataccatgaccttcttcatttcgtgccaaaatgatatacagtcttaaatagttacgcaatatctcaatagtttcataattgttagctgttttcatcaaggtttgtatcctgtttaacatgatggcgttctataacgtctctattttctatttttaattttttaaatttttaacgatttactgtggctagatacccaatctctctcaaatatttttttagcctcgcttacaagctgtttatctatactattaaaactgacgaatccgtgattttggtaatgggttccgtcgaaatttgccgaagtgatatgaacatattcgtcgtcgactatcaacaattttgtattattctgaatagtgaaaaccttcacagatagatcattttgaacacacaacgcatctagacttttggcggttgccatagaatatacgtcgttcttatcccaattaccaactagaagtctgatcttaactcctctattaatggctgcttctataatggagttgtaaatgtcgggccaatagtagctattaccgtcgacacgtgtagtgggaactatggccaaatgttcaatatctatactagtcttagctgacctgagtttatcaataactacatcggtatctagatctctagaatatcccaataggtgttccggagaatcagtaaagaacactccacctataggattcttaatatgatacgcagtgctaactggcaaacaacaagccgcagagcataaattcaaccatgaattttttgcgctattaaaggctttaaaagtatcaaatcttctacgaagatctgtggccagcgggggataatcagaatatacacctaacgttttaatcgtatgtatagatcctccagtaaatgacgcgtttcctacataacatctttcatcatctgacacccaaaaacaaccgagtagtagtcccacattattttttttatctatattaacggttataaaatttatatccgggcagtgactttgtagctctcccagatttcttttccctcgttcatctagcaaaactattattttaatccctttttcagatgcctcttttagtttatcaaaaataagcgctcccctagtcgtactcagaggattacaacaaaaagatgctatgtatatatatttcttagctagagtgataatttcgttaaaacattcaaatgttgttaaatgatcggatctaaaatccatattttctggtagtgtttctaccagcctacattttgctcccgcaggtaccgatgcaaatggccacatttagttaacataaaaacttatacatcctgttctatcaacgattctagaatatcatcggctatatcgctaaaattttcatcaaagtcgacatcacaacctaactcagtcaatatattaagaagttccatgatgtcatcttcgtctatttctatatccgtatccattgtagattgttgaccgattatcgagtttaaatcattactaatactcaatccttcagaatacaatctgtgtttcattgtaaatttataggcggtgtatttaagttggtagattttcaattatgtattaatatagcaacagtagttcttgctcctccttgattctagcatcctcttcattattttcttctacgtacataaacatgtccaatacgttagacaacacaccgacgatggcggccgcagatctcgagttatgatctacttccttaccgtgcaataaattagaatatattttctacttttacgagaaattaattattgtatttattatttatgggtgaaaaacttactataaaaagcgggtgggtttggaattagtgaaagcttaaaaattgaaattttattttttttttttggaatataaataagctcgaagtcgacagatctaggcctggtaccaggaggaggaattcagcttaaagatgacttcgaaagtttatgatccagaacaaaggaaacggatgataactggtccgcagtggtgggccagatgtaaacaaatgaatgttcttgattcatttattaattattatgattcagaaaaacatgcagaaaatgctgttatttttttacatggtaacgcggcctcttcttatttatggcgacatgttgtgccacatattgagccagtagcgcggtgtattataccagatcttattggtatgggcaaatcaggcaaatctggtaatggttcttataggttacttgatcattacaaatatcttactgcatggtttgaacttcttaatttaccaaagaagatcatttttgtcggccatgattggggtgcttgtttggcatttcattatagctatgagcatcaagataagatcaaagcaatagttcacgctgaaagtgtagtagatgtgattgaatcatgggatgaatggcctgatattgaagaagatattgcgttgatcaaatctgaagaaggagaaaaaatggttttggagaataacttcttcgtggaaaccatgttgccatcaaaaatcatgagaaagttagaaccagaagaatttgcagcatatcttgaaccattcaaagagaaaggtgaagttcgtcgtccaacattatcatggcctcgtgaaatcccgttagtaaaaggtggtaaacctgacgttgtacaaattgttaggaattataatgcttatctacgtgcaagtgatgatttaccaaaaatgtttattgaatcggatccaggattcttttccaatgctattgttgaaggcgccaagaagtttcctaatactgaatttgtcaaagtaaaaggtcttcatttttcgcaagaagatgcacctgatgaaatgggaaaatatatcaaatcgttcgttgagcgagttctcaaaaatgaacaagcggccgccgccaccatgagcaagggcgaggaactgttcactggcgtggtcccaattctcgtggaactggatggcgatgtgaatgggcacaaattttctgtcagcggagagggtgaaggtgatgccacatacggaaagctcaccctgaaattcatctgcaccactggaaagctccctgtgccatggccaacactggtcactaccttcacctatggcgtgcagtgcttttccagatacccagaccatatgaagcagcatgactttttcaagagcgccatgcccgagggctatgtgcaggagagaaccatctttttcaaagatgacgggaactacaagacccgcgctgaagtcaagttcgaaggtgacaccctggtgaatagaatcgagctgaagggcattgactttaaggaggatggaaacattctcggccacaagctggaatacaactataactcccacaatgtgtacatcatggccgacaagcaaaagaatggcatcaaggtcaacttcaagatcagacacaacattgaggatggatccgtgcagctggccgaccattatcaacagaacactccaatcggcgacggccctgtgctcctcccagacaaccattacctgtccacccagtctgccctgtctaaagatcccaacgaaaagagagaccacatggtcctgctggagtttgtgaccgctgctgggatcacacatggcatggacgagctgtacaagtgagcggccgccctgctagcaagcttgctagcggccgctcgagatctgcggccgctacagacacgaatatgactaaaccgatgaccatttaaaaacccctctctagctttcacttaaactgtatcgatcattcttttagcacatgtataatataaaaacattattctatttcgaatttaggcttccaaaaatttttcatccgtaaaccgataataatatatatagacttgttaatagtcggaataaatagattaatgcttaaactatcatcatctccacgattagagatacaatatttacattctttttgctgtttcgaaactttatcaatacacgttaatacaaacccaggaaggagatattgaaactgaggctgttgaaaatgaaacggtgaatacaataattcagataatgtaaaatcatgattccgtattctgatgatattagaactgctaatggatgtcgatggtatgtatctaggagtatctattttaacaaagcatcgatttgctaatatacaattatccttttgattaattgttattttattcatattcttaaaaggtttcatatttatcaattcttctacattaaaaatttccatttttaatttatgtagccccgcaatactcctcattacgtttcattttttgtctataatatccattttgttcatctcggtacatagattatccaattgagaagcgcatttagtagttttgtacattttaagtttattgacgaatcgtcgaaaactagttatagttaacattttattatttgataccctgatattaatacccctgccgttactattatttataactgatgtaatccacgtaacattggaattaactatcgatagtaatgcatcgacgcttccaaaattgtctattataaactcaccgataatttttttattgcatgttttcatattcattaggattatcaaatctttaatcttattacgattgtatgcgttgatattacaagacgtcattctaaaagacggaggatctccatcaaatgccagacaatcacgtacaaagtacatggaaataggttttgttctattgcgcatcatagatttatatagaacacccgtagaaatactaatttgttttactctataaaatactaatgcatctatttcatcgttttgtataacgtctttccaagtgtcaaattccaaatttttttcattgatagtaccaaattcttctatctctttaactacttgcatagataggtaattacagtgatgcctacatgccgttttttgaaactgaatagatgcgtctagaagcgatgctacgctagtcacaatcaccactttcatatttagaatatatatatgtaaaaatatagtagaatttcattttgtttttttctatgctataaatgaattctcattttgcatctgctcatactccgttttatattaataccaaagaaggaagatatctggttctaaaagccgttaaagtatgcgatgttagaactgtagaatgcgaaggaagtaaagcttcctgcgtactcaaagtagataaaccctcatcgcccgcgtgtgagagaagaccttcgtccccgtccagatgcgagagaatgaataaccctggaaaacaagttccgtttatgaggacggacatgctacaaaatatgttcgcggctaatcgcgataatgtagcttctagacttttgtcctaaaatactattatatccttttcgatattaataaatccgtgtcgtccaggttttttatctctttcagtatgtgaatagataggtattttatctctattcatcatcgaatttaagagatccgataaacattgtttgtattctccagatgtcagcatctgatacaacaatatatgtgcacataaacctctggcacttatttcatgtaccttccccttatcactaaggagaatagtatttgagaaatatgtatacatgatattatcatgaattagatatacagaatttgtaacactctcgaaatcacacgatgtgtcggcgttaagatctaatatatcactcgataacacattttcatctagatacactagacattttttaaagctaaaatagtctttagtagtaacagtaactatgcgattattttcatcgatgatacatttcatcggcatattattacgcttaccatcaaagactataccatgtgtatatctaacgtattctagcatggttgccatacgcgcattaaacttttcaggatctttggatagatcttccaatctatctatttgagaaaacatttttatcatgttcaatagttgaaacgtcggatccactatatagatattatctataaagattttaggaactacgttcatggtatcctggcgaatattaaaactatcaatgatatgattatcgttttcatcttttatcaccatatagtttctaagatatgggattttacttaatataatattatttcccgtgataaattttattagaaaggccaaatctataagaaaagtcctagaattagtctgaagaatatctatatcgccgtatagtatatttggattaattagatatagagaatatgatccgtaacatatacaacttttattatggcgtctaagatattcttccatcaacttattaacatttttgactagggaagatacattatgacgtcccattacttttgccttgtctattactgcgacgttcatagaatttagcatatctcttgccaattcttccattgatgttacattataagaaattttagatgaaattacatttggagctttaatagtaagaactcctaatatgtccgtgtatgtggtcactaatacagattgtagttctataatcgtaaataatttacctatattatatgtttgagtctgtttagaaaagtagctaagtatacgatcttttatttctgatgcagatgtattaacatcggaaaaaaatctttttttattcttttttactaaagatacaaatatgtctttgttaaaaacagttattttctgaatatttctagcttgtaattttaacatatgatattcgttcacactaggtactctgcctaaataggtttctataatctttaatgtaatattaggaaaagtattctgatcaggattcctattcattttgaggatttaaaactctgattattgtctaatatggtctctacgcaaactttttcacagagcgatagagtttttgataactcgtttttcttaagaaatataaaactactgtctccagagctcgctctatcttttattttatctaattcgatacaaactcctgatactggttcagaaagtaattcattaattttcagtcctttatagaagatatttaatatagataatacaaaatcttcagtttttgatatcgatctgattgatcctagaactagatatattaataacgtgctcattaggcagtttatggcagcttgataattagatatagtatattccagttcatatttattagataccgcattgcccagattttgatattctatgaattcctctgaaaataaatccaaaataactagacattctattttttgtggattagtgtactctcttccctctatcatgttcactactggtgtccacgatgataaatatctagagggaatataatatagtccataggatgccaatctagcaatgtcgaataactgtaattttattcttcgctcttcattatgaattgattcttgaggtataaacctaacacaaattatattattagacttttcgtatgtaatgtctttcatgttataagtttttaatcctggaatagaatctattttaatgaggcttttaaacgcagagttctccaacgagtcaaagcataatactctgttgtttttcttatatacgatgttacgattttcttctttgaatggaataggtttttgaattagtttataattacaacataatagataaggaagtgtgcaaatagtacgcggaaaaaacataatagctcccctgttttcatccatggttttaagtaaatgatcactggcttctttagtcaatggatattcgaacattaaccgtttcatcatcattggacagaatccatatttcttaatgtaaagagtgatcaaatcattgtgtttattgtaccatcttgttgtaaatgtgtattcggttatcggatctgctcctttttctattaaagtatcgatgtcaatctcgtctaagaattcaactatatcgacatatttcatttgtatacacataaccattactaacgtagaatgtataggaagagatgtaacgggaacagggtttgttgattcgcaaactattctaatacataattcttctgttaatacgtcttgcacgtaatctattatagatgccaagatatctatataattattttgtaagatgatgttaactatgtgatctatataagtagtgtaataattcatgtattttgatatatgttccaactctgtctttgtgatgtctagtttcgtaatatctatagcatcctcaaaaaatatattcgcatatattcccaagtcttcagttctatcttctaaaaaatcttcaacgtatggaatataataatctattttacctcttctgatatcattaatgatatagtttttgacactatcttctgtcaattgattcttattcactatatctaagaaacggatagcgtccctaggacgaactactgccattaatatctctattatagcttctggacataattcatctattataccagaattaatgggaactattccgtatctatctaacatagttttaagaaagtcagaatctaagacttgatgttcatatattggttcatacatgaaatgatctctattgatgatagtgactatttcattctctgaaaattggtaactcattctatatatgctttccttgttgatgaaggatagaatatactcaatagaatttgtaccaacaaactgttctcttatgaatcgtatatcatcatctgaaataatcatgtaaggcatacatttaacaattagagacttgtctcctgttatcaatatactattcttgtgataatttatgtgtgaggcaaatttgtccacgttctttaattttgttatagtagatatcaaatccaatggagctacagttcttggcttaaacagatatagtttttctggaacaaattctacaacattattataaaggactttgggtagataagtgggatgaaatcctattttaattaatgcgatagccttgtcctcgtgcagatatccaaacgcttttgtgatagtatggcattcattgtctagaaacgctctacgaatatctgtgacagatatcatctttagagaatatactagtcgcgttaatagtactacaatttgtattttttaatctatctcaataaaaaaattaatatgtatgattcaatgtataactaaactactaactgttattgataactagaatcagaatctaatgatgacgtaaccaagaagtttatctactgccaatttagctgcattatttttagcatctcgtttagattttccatcggccttatcgaatactcttccgtcgatgtctacacaggcataaaatgtaggagagttactaggcccaactgattcaatacgaaaagaccaatctctcctagtaatttggcagtactcattaataacggtgacagggttagcatctttccaatcaataatttttttagccggaataacatcatcaaaagacttatgatcctctctcattgatttttcgcgggatacatcatctattatgacgtcagccatagcatcagcatccggcttatccgcctccgttgtcataaaccaacgaggaggaatatcgtcggagctgtacaccatagcactacgttgaagatcgtacagagctttattaacttctcgcttctccatattaagttgtctagttagttgtgcagcagtagctccttcgattccaatgtttttaatagccgcacacacaatctctgcgtcagaacgctcgtcaatatagatcttagacatttttagagagaactaacgcaaccagcaataaaactgaacctactttatcatttttttattcatcatcctctggtggttcgtcgttcctatcaaatgtagctctgattaacccgtcatctataggtgatgctggttctggagattctggaggagatggattattatctggaagaatctctgttatttccttgttttcatgtatcgattgcgttgtaacattaagattgcgaaatgctctaaatttgggaggcttaaagtgttgtttgcaatctctacacgcgtgtctaactagtggaggttcgtcagctgctctagtttgaatcatcatcggcgtagtattcctacttttacagttaggacacggtgtattgtatttctcgtcgagaacgttaaaataatcgttgtaactcacatcctttattttatctatattgtattctactcctttcttaatgcattttataccgaataagagatagcgaaggaattctttttcggtgccgctagtacccttaatcatatcacatagtgttttatattccaaatttgtggcaatagacggtttatttctatacgatagtttgtttctggaatcctttgagtattctataccaatattattctttgattcgaatttagtttcttcgatattagattttgtattacctatattcttgatgtagtactttgatgatttttccatggcccattctattaagtcttccaagttggcatcatccacatattgtgatagtaattctcggatatcagtagcggctaccgccattgatgtttgttcattggatgagtaactactaatgtatacattttccatttataacacttatgtattaactttgttcatttatattttttcattattatgttgatattaacaaaagtgaatatatatatgttaataattgtattgtggttatacggctacaattttataatgagtgaaagtcagtgtccgatgatcaatgacgatagctttactctgaaaagaaagtatcaaatcgatagtgcggagtcaacaataaaaatggataagaagaggataaagtttcagaatagagccaaaatggtaaaagaaataaatcagacaataagagcagcacaaactcattacgagacattgaaactaggatacataaaatttaagagaatgattatgactactactctagaagatatagcaccatctattccaaataatcagaaaacttataaactattctcggacatttcagccatcggcaaagcatcacagaatccgagtaagatggtatatgctctgctgctttacatgtttcccaatttgtttggagatgatcatagattcattcgttatagaatgcatccaatgagtaaaatcaaacacaagatcttctctcctttcaaacttaatcttattagaatattagtggaagaaagattctataataatgaatgcagatctaataaatggagaataattggaacacaagttgataaaatgttgatagctgaatctgataaatatacaatagatgcaaggtataacctaaaacccatgtatagaatcaagggagaatctgaagaagataccctctttatcaaacagatggtagaacaatgtgtgacatcccaggaattggtggaaaaagtgttgaagatactgtttagagatttgttcaagagtggagaatacaaagcgtacagatacgatgatgatgtagaaaatggatttattggattggatacactaaaattaaacattgttcatgatatagttgaaccatgtatgcctgttcgtaggccagtggctaagatactgtgtaaagaaatggtaaataaatactttgagaatccgctacatattattggtaaaaatcttcaagagtgcattgactttgttagtgaataggcatttcatctttctccaatactaattcaaattgttaaattaataatggatagtataaatagttattagttataagatagtaaaaataattattagaataagagtgtagtatcatagataactctcttctataaaaatggattttattcgtagaaagtatcttatatacacagtagaaaataatatagattttttaaaggatgatacattaagtaaagtaaacaattttaccctcaatcatgtactagctctcaagtatctagttagcaattttcctcaacacgttattactaaggatgtattagctaataccaatttttttgttttcatacatatggtacgatgttgtaaagtgtacgaagcggttttacgacacgcatttgatgcacccacgttgtacgttaaagcattgactaagaattatttatcgtttagtaacgcaatacaatcgtacaaggaaaccgtgcataaactaacacaagatgaaaaatttttagaggttgccgaatacatggacgaattaggagaacttataggcgtaaattatgacttagttcttaatccattatttcacggaggggaacccatcaaagatatggaaatcatttttttaaaactgtttaagaaaacagacttcaaagttgttaaaaaattaagtgttataagattacttatttgggcatacctaagcaagaaagatacaggcatagagtttgcggataatgatagacaaaatatatacactctatttcaacaaactggtagaatcgtccatagcaatctaacagaaacgtttagagattatatctttcccggagataagactagctattgggtgtggttaaacgaaagtatagctaatgatgcggatatcgttcttaatagacacgccattaccatgtatgataaaattcttagttatatatactctgagataaaacaaggacgcgttaataaaaacatgcttaagttagtttatatctttgagcctgaaaaagatatcagagaacttctgctagaaatcatatatgatattcctggagatatcctatctattattgatgcaaaaaacgacgattggaaaaaatattttattagtttttataaagctaattttattaacggtaatacatttattagtgatagaacgtttaacgaggacttattcagagttgttgttcaaatagatcccgaatatttcgataatgaacgaattatgtctttattctctacgagtgctgcggacattaaacgatttgatgagttagatattaataacagttatatatctaatataatttatgaggtgaacgatatcacattagatacaatggatgatatgaagaagtgtcaaatctttaacgaggatacgtcgtattatgttaaggaatacaatacatacctgtttttgcacgagtcggatcccatggtcatagagaacggaatactaaagaaactgtcatctataaaatccaagagtagacggctgaacttgtttagcaaaaacattttaaaatattatttagacggacaattggctcgtctaggtcttgtgttagatgattataaaggagacttgttagttaaaatgataaaccatcttaagtctgtggaggatgtatccgcattcgttcgattttctacagataaaaaccctagtattcttccatcgctaatcaaaactattttagctagttataatatttccatcatcgtcttatttcaaaggtttttgagagataatctatatcatgtagaagaattcttggataaaagcatccatctaaccaagacggataagaaatatatacttcaattgataagacacggtagatcatagaacagaccaaatatattattaataatttgtatatacatagatataattatcacacatttttgataaatgggaactgctgcaacaattcagactcccaccaaattaatgaataaagaaaatgcagaaatgattttggaaaaaattgttgatcatatagttatgtatattagtgacgaatcaagtgattcagaaaataatcctgaatatattgattttcgtaacagatacgaagactatagatctctcattataaaaagtgatcacgagtttgtaaagctatgtaaaaatcatgcggagaaaagttctccagaaacgcaacaaatgattatcaaacacatatacgaacaatatcttattccagtatctgaagtactattaaaacctataatgtccatgggtgacataattacatataacggatgtaaagacaatgaatggatgctagaacaactctctaccctaaactttaacaatctccgcacatggaactcatgtagcataggcaatgtaacgcgtctgttttatacattttttagttatctgatgaaagataaactaaatatataagtataatcccattctaatactttaacctgatgtattagcatcttattagaatattaacctaactaaaagacataacataaaaactcattacatagttgataaaaagcggtaggatataaatattatggctgccaccgttccgcgttttgacgacgtgtacaaaaatgcacaaagaagaattctagatcaagaaacattttttagtagaggtctaagtagaccgttaatgaaaaacacatatctatttgataattacgcgtatggatggataccagaaactgcaatttggagtagtagatacgcaaacctagatgctagtgactattatcccatttcgttgggattacttaaaaagttcgagtttctcatgtctctatataaaggtcctattcccgtatatgaagaaaaagtaaatactgaattcatagccaatggatcgttctctggtagatacgtatcatatcttcgaaagttttctgcccttccaacaaacgagtttattagttttttgttactgacttccattccaatctataatatcttgttctggtttaaaaacacacagtttgatattactaaacacacattattcagatacgtctatacagataatgccaaacacctggcgttggctaggtatatgcatcaaacaggagactataagcctttgtttagtcgtctcaaagagaattatatatttaccggtcccgttccaataagtatcaaagatatagatcaccctaatcttagtagagcaagaagtccatccgattatgagacattagctaatattagtactatattgtactttaccaagtatgatccggtattaatgtttttattgttttacgtacctgggtattcaattactacaaaaattactccagccgtagaatatctaatggataaactgaatctaacaaagagcgacgtacaactgttgtaaattattttatgcttcgtaaaatgtaggttttgaaccaaacattctttcaaagaatgagatgcataaaactttattatccaatagattgactatttcggacgtcaatcgtttaaagtaaacttcgtaaaatattctttgatcactgccgagtttaaaacttctatcgataattgtctcatatgttttaatatttacaagttttttggtccatggtacattagccggacaaatatatgcaaaataatatcgttctccaagttctatagtttctggattatttttattatattcagtaactaaatacatattagggttatctgcggatttataatttgagtgatgcattctactcaacataaataattctagaggagacgatctactatcaaattcggatcgtaaatctgtttctaaagaacggagaatatctatacatacctgattagaattcatccgtccttcagacaacatctcagacagtctggttttgtacatcttaatcatattcttatgaaacttggaaacatctcttctagtttcactagtacctttattaattctctcaggtacagattttgaattcgacgatgctgagtatttcatcgttgtatatttcttcttcgattgcataatcagattcttatataccgcctcaaactctattttaaaattattaaacaatactctattattaatcagtcgttctaactctttcgctatttctatagacttatctacatcttgactgtctatctctgtaaacacggagtcggtatctccatacacgctacgaaaacgaaatctgtaatctataggcaacgatgttttcacaatcggattaatatctctatcgtccatataaaatggattacttaatggattggcaaaccgtaacataccgttagataactctgctccatttagtaccgattctagatacaagatcattctacgtcctatggatgtgcaactcttagccgaagcgtatgagtatagagcactatttctaaatcccatcagaccatatactgagttggctactatcttgtacgtatattgcatggaatcatagatggccttttcagttgaactggtagcctgttttagcatctttttatatctggctctctctgccaaaaatgttcttaatagtctaggaatggttccttctatcgatctatcgaaaattgctatttcagagatgaggttcggtagtctaggttcacaatgaaccgtaatatatctaggaggtggatatttctgaagcaatagctgattatttatttcttcttccaatctattggtactaacaacgacaccgactaatgtttccggagatagatttccaaagatacacacattaggatacagactgttataatcaaagattaatacattattactaaacattttttgttttggagcaaataccttaccgccttcataaggaaacttttgttttgtttctgatctaactaagatagttttagtttccaacaatagctttaacagtggacccttgatgactgtactcgctctatattcgaataccatggattgaggaagcacatatgttgacgcacccgcgtctgtttttgtttctactccataatactcccacaaatactgacacaaacaagcatcatgaatacagtatctagccatatctaaagctatgtttagattataatccttatacatctgagctaaatcaacgtcatcctttccgaaagataatttatatgtatcattaggtaaagtaggacataatagtacgactttaaatccattttcccaaatatctttacgaattactttacatataatatcctcatcaacagtcacataattacctgtggttaaaacctttgcaaatgcagcggctttgcctttcgcgtctgtagtatcgtcaccgatgaacgtcatttctctaactcctctatttaatactttacccatgcaactgaacgcgttcttggatatagaatccaatttgtacgaatccaatttttcaaatttttgaatgaatgaatatagatcgaaaaatatagttccattattgttattaacgtgaaacgtagtattggccatgccgcctactcccttatgactagactgatttctctcataaatacagagatgtacagcttcctttttgtccggagatctaaagataattttctctcctgttaataactctagacgattagtaatatatctcagatcaaagttatgtccgttaaaggtaacgacgtagtcgaacgttagttccaacaattgtttagctattcgtaacaaaactatttcagaacatagaactagttctcgttcgtaatccatttccattagtgactgtatcctcaaacatcctctatcgacggcttcttgtatttcctgttccgttaacatctcttcattaatgagcgtaaacaataatcgtttaccacttaaatcgatataacagtaacttgtatgcgagattgggttaataaatacagaaggaaacttcttatcgaagtgacactctatatctagaaataagtacgatcttgggatatcgaatctaggtatttttttagcgaaacagttacgtggatcgtcacaatgataacatccattgttaatctttgtcaaatattgctcgtccaacgagtaacatccgtctggagatatcccgttagaaatataaaaccaactaatattgagaaattcatccatggtggcattttgtatgctgcgtttctttggctcttctatcaaccacatatctgcgacggagcattttctatctttaatatctagattataacttattgtctcgtcaatgtctatagttctcatctttcccaacggcctcgcattaaatggaggaggagacaatgactgatatatttcgtccgtcactacgtaataaaagtaatgaggaaatcgtataaatacggtctcgccatttcgacatctggatttcagatataaaaatctgttttcaccgtgactttcaaaccaattaatgcaccgaacatccatttatagaatttagaaatatattttcatttaaatgaatcccaaacattggggaagagccgtatggaccattatttttatagtactttcgcaagcgggtttagacggcaacatagaagcgtgtaaacgaaaactatatactatagttagcactcttccatgtcctgcatgtagacggcacgcgactatcgctatagaggacaataatgtcatgtctagcgatgatctgaattatatttattattttttcatcagattatttaacaatttggcatctgatcccaaatacgcgatcgatgtgacaaaggttaaccctttataaacttaacccattataaaacttatgattagtcacaactgaaataaccgcgtgattattttttggtataattctacacggcatggtttctgtgactatgaattcaacccccgttacattagtgaaatctttaacaaacagcaagggttcgtcaaagacataaaactcattgtttacaatcgaaatagaccccctatcacacttaaaataaaaaatatccttatcctttaccaccaaataaaattctgattggtcaatgtgaatgtattcacttaacagttccacaaatttatttattaactccgaggcacatacatcgtcggtattttttatggcaaactttactcttccagcatccgtttctaaaaaaatattaacgagttccatttatatcatccaatattattgaaatgacgttgatggacagatgatacaaataagaaggtacggtacctttgtccaccatctcctccaattcatgctctattttgtcattaactttaatgtatgaaaacagtacgccacatgcttccatgacagtgtgtaacactttggatacaaaatgtttgacattagtataattgtccaagactgtcaatctataatagatagtagctataatatattctatgatggtattgaagaagatgacaaccttggcatattgatcatttaacacagacatggtatcaacagatagcttgaatgaaagagaatcagtaattggaataagcgtcttctcgatagagtgtccgtataccaacatgtctgatattttgatgtattccattaaattatttagttttttctttttattctcgttaaacagcatttctgtcaacggaccccaacatcgttgaccgattaagttttgattgatttttccgtgtaaggcgtatctagtcagatcgtatagcctatccaataatccatcgtctgtgtgtagatcacatcgtacactttttaattctctatagaagagcgacagacatctggagcaattacagacagcaatttctttattctctacagatgtaagatacttgaagacattcctatgatgatgcagaattttggataacacggtattgatggtatctgttaccataattcctttgatggctgatagtgtcagagcacaagatttccaatctttgacaatttttagcaccattatctttgttttgatatctatatcagacagcatggtgcgtctgacaacacagggattaagacggaaagatgaaatgattctctcaacatcttcaatagataccttgctattttttctggcattatctatatgtgcgagaatatcctctagagaatcagtatcctttttgatgatagtggatctcaatgacatgggacgtttaaaccttcttattctatcaccagattgcatggtgatttgtcttctttcttttatcataatgtaatctctaaattcatcggcaaattgtctatatctaaaatcataatatgagatgtttacctctacaaatatctgttcgtccaatgttagagtatttacatcagttttgtattccaaattaaacatggcaacggatttaattttatattcctctattaagtcctcgtcgataataacagaatgtagataatcatttaatccgtcgtacatggttggaagatgcttgttgacaaaatctttaattgtcttgatgaaggtgggactatatctaacatcttgattaataaaatttataacattgtccataggatactttgtaactagttttatacacatctcttcatcggtaagtttagacagaatatcgtgaacaggtggtatattatattcatcagatatacgaagaacaatgtccaaatctatattgtttaatatattatatagatgtagcgtagctcctacaggaatatctttaactaagtcaatgatttcatcaaccgttagatctattttaaagttaatcatataggcattgatttttaaaaggtatgtagccttgactacattctcattaattaaccattccaagtcattgtgtgtaagaagattatattctatcataagcttgactacatttggtcccgataccattaaagaattcttatgatataaggaaacagattttaggtactcatctactctacaagaattttggagagccttaacgatatcagtgacgtttattatttcaggaggaaagaatctaacattgagaatatcggaattaatagcttccagatacagtgattttggcaatagtccgtgtaatccataatccagtaacacgagctggtgcttgctagacaccttttcaatgtttaatttttttgaaataagctttgataaagccttcctcgcaaattccggatacatgaacatgtcggcgacatgattaagtattgttttttcattatttttatattttctcaacaagttctcaataccccaatagatgatagaatatcacccaatgcgtccatgttgtctatttccaacaggtcgctatatccaccaatagaagtttttccaaaaaagattctaggaacagttctaccaccagtaatttgttcaaaataatcccgcaattcattttcgggtttaaattctttaatatcgacaatttcatacgctcctcttttgaaactaaacttatttagaatatccagtgcatttctacaaaaaggacatgtatacttgacaaaaattgtcactttgttattggccaacctttgttgtacaaattcctcggccattttaatatttaagtgatataaaactatctcgacttatttaactctttagtcgagatatatggacgcagatagctatatgatagccaactacagaaggcaaacgctataaaaaacataattacgacgagcatatttataaatatttttattcagcattacttgatatagtaatattaggcacagtcaaacattcaaccactctcgatacattaactctctcattttctttaacaaattctgcaatatcttcgtaaaaagattcttgaaactttttagaatatctatcgactctagatgaaatagcgttcgtcaacatactatgttttgtatacataaaggcgcccattttaacagtttctagtgacaaaatgctagcgatcctaggatcctttagaatcacatagattgacgattcgtctctcttagtaactctagtaaaataatcatacaatctagtacgcgaaataatattatccttgacttgaggagatctaaacaatctagttttgagaacatcgataagttcatcgggaatgacatacatactatctttaatagaactcttttcatccagttgaatggattcgtccttaaccaactgattaatgagatcttctattttatcattttccagatgatatgtatgtccattaaagttaaattgtgtagcgcttctttttagtctagcagccaatactttaacatcactaatatcgatatacaaaggagatgatttatctatggcattaagaattcgtttttcgacatccgtcaaaaccaattcctttttgcctgtatcatccagttttccatcctttgtaaagaaattattttctactagactattaataagactgataaggattcctccataattgcacaatccaaactttttaacaaaactagactttacgagatctacaggaatgcgtacttcaggttttttagcttgtgattttttcttttgcggacattttctagtaaccaactcatctaccatttcattgattttagcagtgaaataagctttcaatgcacgggcactgatactattgaaaacgagttgatcttcaaattccgccatttaagttcaccaaacaacttttaaatacaaatatatcaatagtagtagaataagaactataaaaaaaataataattaaccaaccccaacaaccggtattattagttgatgtggtagttttctcatcacttagaacagatttaacaatttctataaagtctgtcaaatcatcttccggagaccccataaatacaccaaatatagcggcgtacaacttatccatttatacattgaatattggcttttctttatcgctatcttcatcatattcatcatcaatatcaacaagtcccagattacgagccagatcttcttctacattttcagtcattgatacacgttcactatctccagagagtccgataacgttagccaccacttctctatcaatgattagtttcttgagcgcgaaagtaatttttgtttccgttccggatctatagaagacgataggtgtgataattgccttggccaattgtctttctcttttactgagtgattctagttcaccttctatagatctgagaatggatgattctccagtcgaaacatattctaccatggatccgtttaatttgttgatgaagatggattcatccttaaatgttttctctgtaatagtttccaccgaaagactatgcaaagaatttggaatgcgttccttgtgcttaatgtttccatagacggcttctagaagttgatacaacataggactagccgcggtaacttttatttttagaaagtatccatcgcttctatcttgtttagatttatttttataaagtttagtctctccttccaacataataaaagtggaagtcatttgactagataaactatcagtaagttttatagagatagacgaacaattagcgtattgagaagcatttagtgtaacgtattcgatacattttgcattagatttactaatcgattttgcatactctataacacccgcacaagtctgtagagaatcgctagatgcagtaggtcttggtgaagtttcaactctcttcttgattaccttactcatgattaaacctaaataattgtactttgtaatataatgatatatattttcactttatctcatttgagaataaaaatgtttttgtttaaccactgcatgatgtacagatttcggaatcgcaaaccaccagtggttttattttatccttgtccaatgtgaattgaatgggagcggatgcgggtttcgtacgtagatagtacattcccgtttttagaccgagactccatccgtaaaaatgcatactcgttagtttggaataactcggatctgctatatggatattcatagattgactttgatcgatgaaggctcccctgtctgcagccatttttatgatcgtcttttgtggaatttcccaaatagttttataaactcgcttaatatcttctggaaggtttgtattctgaatggatccaccatctgccataatcctattcttgatctcatcattccataattttctctcggttaaaactctaaggagatgcggattaactacttgaaattctccagacaatactctccgagtgtaaatattactggtatacggttccaccgactcattatttcccaaaatttgagcagttgatgcagtcggcataggtgccaccaataaactatttctaagaccgtatgttctgattttatcttttagaggttcccaattccaaagatccgacggtacaacattccaaagatcatattgtagaataccgttactggcgtacgatcctacatatgtatcgtatggtccttccttctcagctagttcacaactcgcctctaatgcaccgtaataaatggtttcgaagatcttcttatttagatcttgtgcttccaggctatcaaatggataatttaagagaataaacgcgtccgctaatccttgaacaccaataccgataggtctatgtctcttattagagatttcagcttctggaataggataataattaatatctataattttattgagatttctgacaattactttgaccacatccttcagtttgagaaaatcaaatcgcccatctattacaaacatgttcaaggcaacagatgccagattacaaacggctacctcattagcatccgcatattgtattatctcagtgcaaagattactacacttgatagttcctaaattttgttgattactctttttgttacacgcatccttataaagaatgaatggagtaccagtttcaatctgagattctataatcgctttccagacgactcgagcctttattatagatttgtatctcctttctctttcgtatagtgtatacaatcgttcgaactcgtctccccaaacattgtccaatccaggacattcatccggacacatcaacgaccactctccgtcatccttcactcgtttcataaagagatcaggaatccaaagagctataaatagatctctggttctatgttcctcgtttcctgtattctttttaagatcgaggaacgccataatatcagaatgccacggttccaagtatatggccataactccaggccgtttgtttcctccctgatctatgtatctagcggtgttattataaactctcaacattggaataataccgtttgatataccattggtaccggagatatagcttccactggcacgaatattactaattgatagacctattccccctgccattttagagattaatgcgcatcgttttaacgtgtcatagataccctctatgctatcatcgatcatgttaagtagaaaacagctagacatttggtgacgactagttcccgcattaaataaggtaggagaagcgtgcgtaaaccatttttcagaaagtagattgtacgtctcaatagctgagtctatatcccattgatgaattcctactgcgacacgcattaacatgtgctgaggtctttcaacgatcttgttgtttattttcaacaagtaggatttttccaaagttttaaaaccaaaatagttgtatgaaaagtctcgttcgtaaataataaccgagttgagtttatccttatatttgttaactatatccatggtgatacttgaaataatcggagaatgtttcccatttttaggattaacatagttgaataaatcctccatcacttcactaaatagtttttttgtttccttgtgtagatttgatacggctattctggcggctagaatggcataatccggatgttgtgtagtacaagtggctgctatttcggctgccagagtgtccaattctaccgttgttactccattatatattccttgaataaccttcatagctattttaataggatctatatgatccgtgtttaagccataacataattttctaatacgagacgtgattttatcaaacatgacattttccttgtatccatttcgtttaatgacaaacatttttgttggtgtaataaaaaaattatttaacttttcattaatagggatttgacgtatgtagcgtacaaaatgattgttcctggtatatagataaagagtcctatatatttgaaaatcgttacggctcgattaaactttaatgattgcatagtgaatatatcattaggatttaactccttgactatcatggcggcgccagaaattaccatcaaaagcattaatacagttataccgatcgcagttagaacggttatagcatccaccatttatatctaaaaattagatcaaagaatatgtgacaaagtcctagttgtatactgagaattgacgaaacaatgtttcttacatatttttttcttattagtaaccgacttaatagtaggaactggaaaactagacttgattattctataagtatagatacccttccaaataatattctctttgataaaagttccagaaaatgtagaattttttaaaaagttatcttttgctattaccaagattgtgtttagacgcttattattaatatgagtgatgaaatccacaccgcctctagatatcgcctttatttccacattagatggtaaatccaatagtgaaactatctttttaggaatgtatggactcgcgtttagaggagtaaacgtcttaggcgtcggaaaggatgattcatcaaacgaataaacaatttcacaaatggatgttaatgtattagtaggaaattttttgacgctattggaattgaagattctaatggatgatgttctacctatttcatccgataacatgttaatttccgacaccaacggttttaatatttcgatgatatacggtagtctctctttcggacttatatagcttattccacaatacgagtcattatatactccaaaaaacaaaataactagtataaaatctgtatcgaatgggaaaaacgaaattatcgacataggtatagaatccggaacattgaacgtattaatacttaattctttttctgtggtaagtaccgataggttattgacattgtatggttttaaatattctataacttgagacttgatagatattagtgatgaattgaaaattatttttatcaccacgtgtgtttcaggatcatcgtcgacgcccgtcaaccaaccgaacggagtaaaataaatatcattaatatatgctctagatattagtatttttatcaatcctttgattatcatcttctcgtaggcgaatgattccatgatcaagagtgatttaagaacatcctccggagtattaatgggcttagtaaacagtccatcgttgcaataataaaagttatccaagttaaaggatattatgcattcgtttaaagatatcacctcatctgacggagacaattttttggtaggttttagagactttgaagctacttgtttaacaaagttattcatcgtcgtctactattctatttaattttgtagttaatttatcacatatcacattaattgactttttggtccacttttccatacgtttatattcttttaatcctgcgttatccgtttccgttatatccagggatagatcttgcaagttaaatagaatgctcttaaataatgtcattttcttatccgctaaaaatttaaagaatgtataaacctttttcagagatttgaaactcttaggtggtgtcctagtacacaatatcataaacaaactaataaacattccacattcagattccaacagctgattaacttccacattaatacagcctattttcgctccaaatgtacattcgaaaaatctgaataaaacatcgatgtcacaatttgtattatccaatacagaatgtttgtgattcgtgttaaaaccatcggagaaggaatagaaataaaaattattatagtggtggaattcagttggaatattgcctccggagtcataaaaggatactaaacattgttttttatcataaattacacatttccaatgagacaaataacaaaatccaaacattacaaatctagaggtagaacttttaattttgtctttaagtatatacgataagatatgtttattcataaacgcgtcaaatttttcatgaatcgctaaggagtttaagaatctcatgtcaaattgtcctatataatccacttcggatccataagcaaactgagagactaagttcttaatacttcgattgctcatccaggctcctctctcaggctctattttcatcttgacgacctttggattttcaccagtatgtattcctttacgtgataaatcatcgattttcaaatccatttgtgagaagtctatcgccttagatactttttcccgtagtcgaggtttaaaaaaatacgctaacggtatactagtaggtaactcaaagacatcatatatagaatggtaacgcgtctttaactcgtcggttaactctttcttttgatcgagttcgtcgctactattgggtctgctcaggtgccccgactctactagttccaacatcataccgataggaatacaagacactttgccggcggttgtagatttatcatatttttccactacatatccgttacaatttgttaaaaatttagatacatctatattgctacataatccagctagtgaatatatatgacataataaattggtaaatcctagttctggtattttactaattactaaatctgtatatctttccatttatcatggaaaagaatttaccagatatcttcttttttccaaactgcgttaatgtattctcttacaaatattcacaagatgaattcagtaatatgagtaaaacggaacgtgatagtttctcattggccgtgtttccagttataaaacatagatggcataacgcacacgttgtaaaacataaaggaatatacaaagttagtacagaagcacgtggaaaaaaagtatctcctccatcactaggaaaacccgcacacataaacctaaccgcgaagcaatatatatacagtgaacacacaataagctttgaatgttatagttttctaaaatgtataacaaatacagaaatcaattcgttcgatgagtatatattaagaggactattagaagctggtaatagtttacagatattttccaattccgtaggtaaacgaacagatactataggtgtactagggaataagtatccatttagcaaaattccattggcctcattaactcctaaagcacaacgagagatattttcagcgtggatttctcatagacctgtagttttaactggaggaactggagtgggtaagacgtcacaggtacccaagttattgctttggtttaattatttatttggtggattctctactctagataaaatcactgactttcacgaaagaccagtcattctatctcttcctaggatagctttagttagattgcatagcaataccattttaaaatcattgggatttaaggtactagatggatctcctatttctttacggtacggatctataccggaagaattaataaacaaacaaccaaaaaaatatggaattgtattttctacccataagttatctctaacaaaactatttagttatggcactcttattatagacgaagttcatgagcatgatcaaataggagatattattatagcagtagcgagaaagcatcatacgaaaatagattctatgtttttaatgactgccacgttagaggatgacagggaacggctaaaagtatttttacctaatcccgcatttatacatattcctggagatacactgtttaaaattagcgaggtatttattcataataagataaatccatcttccagaatggcatacatagaagaagaaaagagaaatttagttactgctatacagatgtatactcctcctgatggatcatccggtatagtctttgtggcatccgttgcacagtgtcacgaatataaatcatatttagaaaaaagattaccgtatgatatgtatattattcatggtaaggtcttagatatagacgaaatattagaaaaagtgtattcatcacctaatgtatcgataattatttctactccttatttggaatccagcgttactatacgcaatgttacacacatttatgatatgggtagagtttttgtccccgctccttttggaggatcgcaacaatttatttctaaatctatgagagatcaacgaaaaggaagagtaggaagagttaatcctggtacatacgtctatttctatgatctgtcttatatgaagtctatacagcgaatagattcagaatttctacataattatatattgtacgctaataagtttaatctaacactccccgaagatttgtttataatccctacaaatttggatattctatggcgtacaaaggaatatatagactcgttcgatattagtacagaaacatggaataaattattatccaattattatatgaagatgatagagtatgctaaactttatgtactaagtcctattctcgctgaggagttggataactttgagaggacgggagaattaactagtattgtacgagaagccattttatctctaaatttacaaattaagattttaaattttaaacataaagatgatgatacgtatatacacttttgtaaaatattattcggtgtctataacggaacaaacgctactatatattatcatagacctctaacgggatatatgaatatgatttcagatactatatttgttcctgtagataataactaaaaatcaaactctaatgaccacatctttttttagagatgaaaaattttccacatctccttttgtagacacgactaaacattttgcagaaaaaagtttattagtgtttagataatcgtatacttcatcagtgtagatagtaaatgtgaacagataaaaggtattcttgctcaatagattggtaaattccatagaatatattaatcctttcttcttgagatcccacatcatttcaaccagagacgttttatccaatgatttacctcgtactataccacatacaaaactagattttgcagtgacgtcgtacctggtattcctaccaaacaaaattttacttttagttcttttagaaaattctaaggtagaatctctatttgccaatatgtcatctatggaattaccactagcaaaaaatgatagaaatatatattgatacatcgcagctggttttgatctactatactttaaaaacgaatcagattccataattgcctgtatatcatcagctgaaaaactatgttttacacgtattccttcggcatttctttttaatgatatatcttgtttagacaatgataaagttatcatgtccatgagagacgcgtctccgtatcgtataaatatttcattagatgttagacgcttcattaggggtatacttctataaggtttcttaatcagtccatcattggttgcgtcaagaactactatcggatgttgttgggtatctctagtgttacacatggccttactaaagtttgggtaaataactatgatatctctattaattatagatgcatatatttcattcgtcaaggatattagtatcgacttgctatcgtcattaatacgtgtaatgtaatcatataaatcatgcgatagccaaggaaaatttaaatagatgttcatcatataatcgtcgctataattcatattaatacgttgacattgactaatttgtaatatagcctcgccacgaagaaagctctcgtattcagtttcatcgataaaggataccgttaaatataactggttgccgatagtctcatagtctattaagtggtaagtttcgtacaaatacagaatccctaaaatattatctaatgttggattaatctttaccataactgtataaaatggagacggagtcataactattttaccgtttgtacttactggaatagatgaaggaataatctccggacatgctggtaaagacccaaatgtctgtttgaagaaatccaatgttccaggtcctaatctcttaacaaaaattacgatattcgatcccgatatcctttgcattctatttaccagcatatcacgaactatattaagattatctatcatgtctattctcccaccgttatataaatcgcctccgctaagaaacgttagtatatccatacaatggaatacttcatttctaaaatagtattcgttttctaattctttaatgtgaaatcgtatactagaaagggaaaaattatctttgagttttccgttagaaaagaaccacgaaactaatgttctgattgcgtccgattccgttgctgaattaatggatttacaccaaaaactcatataacttctagatgtagaagcattcgctaaaaaattagtagaatcaaaggatataagtagatgttccaacaagtgagcaattcccaagatttcatctatatcattctcgaatccgaaattagaaattcccaagtagatatcctttttcatccgatcgttgatgaaaatacgaactttattcggtaagacaatcatttactaaggagtaaaataggaagtaatgttcgtatgtcgttatcatcgtataaattaaaggtgtgttttttaccattaagtgacattataattttaccaatattggaattataatataggtgtatttgcgcactcgcgacggttgatgcatcggtaaatatagctgtatctaatgttctagtcggtatttcatcatttcgctgtctaataatagcgttttctctatctgtttccattacagctgcctgaagtttattggtcggataatatgtaaaataataagaaatacatacgaataacaaaaataaaataagatataataaagatgccatttagagatctaattttgtttaacttgtccaaattcctacttacagaagatgaggaatcgttggagatagtgtcttccttatgtagaggatttgaaatatcttataatgacttgataacttactttccagataggaaataccataaatatatttataaagtatttgaacatgtagatttatcggaggaattaagtatggaattccatgatacaactctgagagatttagtctatcttagattgtacaagtattccaagtgtatacggccgtgttataaattaggagataatctaaaaggcatagttgttataaaggacaggaatatttatattagggaagcaaatgatgacttgatagaatatctcctcaaggaatacactcctcagatttatacatattctaatgagcgcgtccccataactggttcaaaattaattctttgtggattttctcaagttacatttatggcgtatacaacgtcgcatataacaacaaataaaaaggtagatgttctcgtttccaaaaaatgtatagatgaactagtcgatccaataaattatcaaatacttcaaaatttatttgataaaggaagcggaacaataaacaaaatactcaggaagatattttattcggtaacaggtggccaaactccataggtagctttttctatttcggattttagaatttccaaattcaccagcgatttatcggttttggtgaaatccaaggatttattaatgtccacaaatgccatttgttttgtctgtggattgtatttgaaaatggaaacgatgtagttagatagatgcgctgcgaagtttcctattagggttccgcgcttcacgtcacccagcatacttgaatcaccatcctttaaaaaaaatgataagatatcaacatggagtatatcatactcgaattttaattcttctactgactcactgacattttcacaaatactacaatacggtttaccgaaaataatcagtacgttcttcatttatgggtatcaaaaacttaaaatcgttactgctggaaaataaatcactgacgatattagatgataatttatacaaagtatacaatggaatatttgtggatacaatgagtatttatatagccgtcgccaattgtgtcagaaacttagaagagttaactacggtattcataaaatacgtaaacggatgggtaaaaaagggagggcatgtaaccctttttatcgatagaggaagtataaaaattaaacaagacgttagagacaagagacgtaaatattctaaattaaccaaggacagaaaaatgttagaattagaaaagtgtacatccgaaatacaaaatgttaccggatttatggaagaagaaataaaggcagaaatgcaattaaaaatcgataaactcacatttcaaatatatttatctgattctgataacataaaaatatcattgaatgagatactaacacatttcaacaataatgagaatgttacattattttattgtgatgaacgagacgcagaattcgttatgtgtctcgaggctaaaacacatttctctaccacaggagaatggccgttgataataagtaccgatcaggatactatgctatttgcatctgctgataatcatcctaagatgataaaaaacttaactcaactgtttaaatttgttccctcggcagaggataactatttagcaaaattaacggcgttagtgaatggatgtgatttctttcctggactctatggggcatctataacacccaccaacttaaacaaaatacaattgtttagtgattttacaatcgataatatagtcactagtttggcaattaaaaattattatagaaagactaactctaccgtagacgtgcgtaatattgttacgtttataaacgattacgctaatttagacgatgtctactcgtatattcctccttgtcaatgcactgttcaagaatttatattttccgcattagatgaaaaatggaatgaatttaaatcatcttatttagaaagcgtgccgttaccctgccaattaatgtacgcgttagaaccacgcaaggagattgatgtttcagaagttaaaactttatcatcttatatagatttcgaaaatactaaatcagatatcgatgttataaaatctatatcctcgatcttcggatattctaacgaaaactgtaacacgatagtattcggcatctataaggataatttactactgagtataaataattcattttactttaacgatagtctgttaataaccaatactaaaagtgataatataataaatataggttactagattaaaaatggtgttccaactcgtgtgctctacatgcggtaaagatatttctcacgaacgatataaattgattatacgaaaaaaatcattaaaggatgtactcgtcagtgtaaagaacgaatgttgtaggttaaaattatctacacaaatagaacctcaacgtaacttaacagtgcaacctctattggatataaactaatatggatccggttaattttatcaagacatatgcgcctagaggttctattatttttattaattataccatgtcattaacaagtcatttgaatccatcgatagaaaaacatgtgggtatttattatggtacgttattatcggaacacttggtagttgaatctacctatagaaaaggagttcgaatagtcccattggatagtttttttgaaggatatcttagtgcaaaagtatacatgttagagaatattcaagttatgaaaatagcagctgatacgtcattaactttattgggtattccgtatggatttggtcatgatagaatgtattgttttaaattggtagctgactgttataaaaatgccggtattgatacatcgtctaaacgaatattgggcaaagatatttttctgagccaaaacttcacagacgataatagatggataaagatatatgattctaataatttaacattttggcaaattgattaccttaaagggtgagttaatatgcataactactcctccgttgttttttccctcgttctttttcttaacgttgtttgccatcactctcataatgtaaagatattctaaaatggtaaacttttgcatatcggacgcagaaattggtataaatgttgtaattgtattatttcccgtcaatggactagtcacagctccatcagttttatatcctttagagtatttctcactcgtgtctaacattctagagcattccatgatctgtttatcgttgatattggccggaaagatagattttttattttttattatattactattggcaattgtagatataacttctggtaaatatttttctaccttttcaatctcttctattttcaagccggctatatattctgctatattgttgctagtatcaataccttttctggctaagaagtcatatgtggtattcactatatcagttttaactggtagttccattagcctttccacttctgcagaataatcagaaattggttctttaccagaaaatccagctactataataggctcaccgatgatcattggcaaaatcctatattgtaccagattaatgagagcatatttcatttccaataattctgctagttcttgagacattgatttatttgatgaatctagttggttctctagatactctaccatttctgccgcatacaataacttgttagataaaatcagggttatcaaagtgtttagcgtggctagaatagtgggcttgcatgtattaaagaatgcggtagtatgagtaaaccgttttaacgaattatatagtctccagaaatctgtggcgttacatacatgagccgaatgacatcgaagattgtccaatatttttaatagctgctctttgtccattatttctatatttgactcgcaacaattgtagataccattaatcaccgattcctttttcgatgccggacaatagcacaattgtttagctttggactctatgtattcagaattaatagatatatctctcaatacagattgcactatacattttgaaactatgtcaaaaattgtagaacgacgctgttctgcagccatttaactttaaataatttacaaaaatttaaaatgagcatccgtataaaaatcgataaactgcgccaaattgtggcatatttttcagagttcagtgaagaagtgtctataaatgtagactcgacggatgagttaatgtatatttttgccgccttgggcggatctgtaaacatttgggcaattatacctctaagtgcatcagtgttttaccgaggagccgaaaatattgtgtttaatcttcctgtgtccaaggtaaaatcgtgtttgtgtagttttcacaatgatgccatcatagatatagaacctgatctggaaaataatctagtaaaactttctagttatcatgtagtaagtgtcgattgtaacaaggaactgatgcctattaggacagatactactatttgtctaagtatagatcaaaagaaatcttacgtgtttaattttcacaagtatgaagaaaaatgttgtggtagaaccgtcattcatctagaatggttgttgggctttatcaagtgtattagtcagcatcagcatctggctattatgtttaaagatgacaatattattatgaagactcctggtaatactgatgcgttttccagggaatattctatgactgaatgttctcaagaactacaaaagttttctttcaaaatagctatctcgtctctcaacaaactacgaggattcaaaaagagagtcaatgtttttgaaactagaatcgtaatggataatgacgataacattttaggaatgttgttttcggatagagttcaatcctttaagatcaacatctttatggcgtttttagattaatactttcaatgagataaatatgggtggcggagtaagtgttgagctccctaaacgggatccgcctccgggagtacccactgatgagatgttattaaacgtggataaaatgcatgacgtgatagctcccgctaagcttttagaatatgtgcatataggaccactagcaaaagataaagaggataaagtaaagaaaagatatccagagtttagattagtcaacacaggacccggtggtctttcggcattgttaagacaatcgtataatggaaccgcacccaattgctgtcgcacttttaatcgtactcattattggaagaaggatggaaagatatcagataagtatgaagagggtgcagtattagaatcgtgttggccagacgttcacgacactggaaaatgcgatgttgatttattcgactggtgtcagggggatacgttcgatagaaacatatgccatcagtggatcggttcagcctttaataggagtaatagaactgtagagggtcaacaatcgttaataaatctgtataataagatgcaaacattatgtagtaaagatgctagtgtaccaatatgcgaatcatttttgcattatttacgcgcacacaatacagaagatagcaaagagatgatcgattatattctaagacaacagtctgcggactttaaacagaaatatatgagatgtagttatcccactagagataagttagaagagtcattaaaatatgcggaacctcgagaatgttgggatccagagtgttcgaatgccaatgttaatttcttactaacacgtaattataataatttaggactttgcaatattgtacgatgtaataccagcgtgaacaacttacagatggataaaacttcctcattaagattgtcatgtggattaagcaatagtgatagattttctactgttcccgtcaatagagcaaaagtagttcaacataatattaaacactcgttcgacctaaaattgcatttgatcagtttattatctctcttggtaatatggatactaattgtagctatttaaatgggtgccgcggcaagcatacagacgacggtgaatacactcagcgaacgtatctcgtctaaattagaacaagaagcgaacgctagtgctcaaacaaaatgtgatatagaaatcggaaatttttatatccgacaaaaccatggatgtaacctcactgttaaaaatatgtgctctgcggacgcggatgctcagttggatgctgtgttatcagccgctacagaaacatatagtggattaacaccggaacaaaaagcatacgtgccagctatgtttactgctgcgttaaacattcagacgagtgtaaacactgttgttagagattttgaaaattatgtgaaacagacttgtaattctagcgcggtcgtcgataacaaattaaagatacaaaacgtaatcatagatgaatgttacggagccccaggatctccaacaaatttggaatttattaatacaggatctagcaaaggaaattgtgccattaaagcgttgatgcaattgacgactaaggccactactcaaatagcacctagacaagttgctggtacaggagttcagttttatatgattgttatcggtgttataatattggcagcgttgtttatgtactatgccaagcgtatgttgttcacatccaccaatgataaaatcaaacttattttagccaataaggaaaacgtccattggactacttacatggacacattctttagaacttctccgatggttattgctaccacggatatgcaaaactgaaaatatattgataatattttaatagattaacatggaagttatcgctgatcgtctagacgatatagtgaaacaaaatatagcggatgaaaaatttgtagattttgttatacacggtctagagcatcaatgtcctgctatacttcgaccattaattaggttgtttattgatatactattatttgttatagtaatttatatttttacggtacgtctagtaagtagaaattatcaaatgttgttggtggtgctagtcatcacattaactattttttattactttatactataatagtactagactgacttctaacaaacatctcacctgccataaataaatgcttgatattaaagtcttctatttctaacactattccatctgtggaaaataatactctgacattatcgctaattgacacatcggtgagtgatatgcctataaagtaataatcttctttgggcacatataccagtgtaccaggttctaacaacctatttactggtgctcctgtagcatactttttctttaccttgagaatatccatcgtttgcttggtcaatagcgatatgtgattttttatcaaccactcaaaaaagtaattggagtgttcatatcctctacgggctattgtctcatggccgtgtatgaaatttaagtaacacgactgtggtagatttgttctatagagccgattgccgcaaatagatagaactaccaatatgtctgtacaaatgttaaacattaattgattaacagaaaaaacaatgttcgttctgggaatagaaaccagatcaaaacaaaattcgttagaatatatgccacgtttatacatggaatataaaataactacagtttgaaaaataacagtatcatttaaacatttaacttgcggggttaatctcacaactttactgtttttgaactgttcaaaatatagcatcgatccgtgagaaatacgtttagccgcctttaatagaggaaatcccaccgcctttctggatctcaccaacgacgatagttctgaccagcaactcatttcttcatcatccacctgttttaacatataataggcaggagatagatatccgtcattgcaatattccttctcgtaggcacacaatctaatattgataaaatctccattctcttctctgcatttattatcttgtctcggtggctgattaggctgtggtcttggtttaggccttggtctatcgttgttgaatctattttggtcattaaatctttcatttcttcctggtatatttctatcacctcgtttggttggatttttgtctatattatcgtttgtaacatcggtacgggtattcatttatcacaaaaaaaacttctctaaatgagtctactgctagaaaacctcatcgaagaagataccatattttttgcaggaagtatatctgagtatgatgatttacaaatggttattgccggcgcaaaatccaaatttccaagatctatgctttctatttttaatatagtacctagaacgatgtcaaaatatgagttggagttgattcataacgaaaatatcacaggagcaatgtttaccacaatgtataatataagaaacaatttgggtctaggagatgataaactaactattgaagccattgaaaactatttcttggatcctaacaatgaagttatgcctcttattattaataatacggatatgactgccgtcattcctaaaaaaagtggtaggagaaagaataagaacatggttatcttccgtcaaggatcatcacctatcttgtgcattttcgaaactcgtaaaaagattaatatttataaagaaaatatggaatccgcgtcgactgagtatacacctatcggagacaacaaggctttgatatctaaatatgcgggaattaatgtcctgaatgtgtattctccttccacatccataagattgaatgccatttacggattcaccaataaaaataaactagagaaacttagtactaataaggaactagaatcgtatagttctagccctcttcaagaacccattaggttaaatgattttctgggactattggaatgtgttaaaaagaatattcctctaacagatattccgacaaaggattgattactataaatggagaatgttcctaatgtatactttaatcctgtgtttatagagcccacgtttaaacattctttattaagtgtttataaacacagattaatagttttatttgaagtattcgttgtattcattctaatatatgtattttttagatctgaattaaatatgttcttcatgcctaaacgaaaaatacccgatcctattgatagattacgacgtgctaatctagcgtgtgaagacgataaattaatgatctatggattaccatggatgacaactcaaacatctgcgttatcaataaatagtaaaccgatagtgtataaagattgtgcaaagcttttgcgatcaataaatggatcacaaccagtatctcttaacgatgttcttcgcagatgatgattcattttttaagtatttggctagtcaagatgatgaatcttcattatctgatatattgcaaatcactcaatatctagactttctgttattattattgatccaatcaaaaaataaattagaagctgtgggtcattgttatgaatctctttcagaggaatacagacaattgacaaaattcacagactttcaagattttaaaaaactgtttaacaaggtccctattgttacagatggaagggtcaaacttaataaaggatatttgttcgactttgtgattagtttgatgcgattcaaaaaagaatcctctctagctaccaccgcaatagatcctgttagatacatagatcctcgtcgcaatatcgcattttctaacgtgatggatatattaaagtcgaataaagtgaacaataattaattctttattgtcatcatgaacggcggacatattcagttgataatcggccccatgttttcaggtaaaagtacagaattaattagacgagttagacgttatcaaatagctcaatataaatgcgtgactataaaatattctaacgataatagatacggaacgggactatggacgcatgataagaataattttgaagcattggaagcaactaaactatgtgatgtcttggaatcaattacagatttctccgtgataggtatcgatgaaggacagttctttccagacattgttgaattagatcgataaaaattaattaattacccgggtaccaggcctagatctgtcgagatccggtggtggtgcaaatcaaagaactgctcctcagtggatgttgcctttacttctaggcctgtacggaagtgttacttctgctctaaaagctgctgcagggggggggggggggtgggggggccggttagggccgccatcccctcagagcgtcgggatatcgggtggcggctcgggacggaggacgcgctagtgttcttctgtgtggcagttcagaatgatggatcaagctagatcagcattctctaacttgtttggtggagaaccattgtcatatacccggttcagcctggctcggcaagtagatggcgataacagtcatgtggagatgaaacttgctgtagatgaagaagaaaatgctgacaataacacaaaggccaatgtcacaaaaccaaaaaggtgtagtggaagtatctgctatgggactattgctgtgatcgtctttttcttgattggatttatgattggctacttgggctattgtaaaggggtagaaccaaaaactgagtgtgagagactggcaggaaccgagtctccagtgagggaggagccaggagaggacttccctgcagcacgtcgcttatattgggatgacctgaagagaaagttgtcggagaaactggacagcacagacttcaccagcaccatcaagctgctgaatgaaaattcatatgtccctcgtgaggctggatctcaaaaagatgaaaatcttgcgttgtatgttgaaaatcaatttcgtgaatttaaactcagcaaagtctggcgtgatcaacattttgttaagattcaggtcaaagacagcgctcaaaactcggtgatcatagttgataagaacggtagacttgtttacctggtggagaatcctgggggttatgtggcgtatagtaaggctgcaacagttactggtaaactggtccatgctaattttggtactaaaaaagattttgaggatttatacactcctgtgaatggatctatagtgattgtcagagcagggaaaatcacctttgcagaaaaggttgcaaatgctgaaagcttaaatgcaattggtgtgttgatatacatggaccagactaaatttcccattgttaacgcagaactttcattctttggacatgctcatctggggacaggtgacccttacacacctggattcccttccttcaatcacactcagtttccaccatctcggtcatcaggattgcctaatatacctgtccagacaatctccagagctgctgcagaaaagctgtttgggaatatggaaggagactgtccctctgactggaaaacagactctacatgtaggatggtaacctcagaaagcaagaatgtgaagctcactgtgagcaatgtgctgaaagagataaaaattcttaacatctttggagttattaaaggctttgtagaaccagatcactatgttgtagttggggcccagagagatgcatggggccctggagctgcaaaatccggtgtaggcacagctctcctattgaaacttgcccagatgttctcagatatggtcttaaaagatgggtttcagcccagcagaagcattatctttgccagttggagtgctggagactttggatcggttggtgccactgaatggctagagggatacctttcgtccctgcatttaaaggctttcacttatattaatctggataaagcggttcttggtaccagcaacttcaaggtttctgccagcccactgttgtatacgcttattgagaaaacaatgcaaaatgtgaagcatccggttactgggcaatttctatatcaggacagcaactgggccagcaaagttgagaaactcactttagacaatgctgctttccctttccttgcatattctggaatcccagcagtttctttctgtttttgcgaggacacagattatccttatttgggtaccaccatggacacctataaggaactgattgagaggattcctgagttgaacaaagtggcacgagcagctgcagaggtcgctggtcagttcgtgattaaactaacccatgatgttgaattgaacctggactatgagaggtacaacagccaactgctttcatttgtgagggatctgaaccaatacagagcagacataaaggaaatgggcctgagtttacagtggctgtattctgctcgtggagacttcttccgtgctacttccagactaacaacagatttcgggaatgctgagaaaacagacagatttgtcatgaagaaactcaatgatcgtgtcatgagagtggagtatcacttcctctctccctacgtatctccaaaagagtctcctttccgacatgtcttctggggctccggctctcacacgctgccagctttactggagaacttgaaactgcgtaaacaaaataacggtgcttttaatgaaacgctgttcagaaaccagttggctctagctacttggactattcagggagctgcaaatgccctctctggtgacgtttgggacattgacaatgagttttaaatgtgatacccatagcttccatgagaacagcagggtagtctggtttctagacttgtgctgatcgtgctaaattttcagtagggctacaaaacctgatgttaaaattccatcccatcatcttggtactactagatgtctttaggcagcagcttttaatacagggtagataacctgtacttcaagttaaagtgaataaccacttaaaaaatgtccatgatggaatattcccctatctctagaattttaagtgctttgtaatgggaactgcctctttcctgttgttgttaatgaaaatgtcagaaaccagttatgtgaatgatctctctgaatcctaagggctggtctctgctgaaggttgtaagtggtcgcttactttgagtgatcctccaacttcatttgatgctaaataggagataccaggttgaaagaccttctccaaatgagatctaagcctttccataaggaatgtagctggtttcctcattcctgaaagaaacagttaactttcagaagagatgggcttgttttcttgccaatgaggtctgaaatggaggtccttctgctggataaaatgaggttcaactgttgattgcaggaataaggccttaatatgttaacctcagtgtcatttatgaaaagaggggaccagaagccaaagacttagtatattttcttttcctctgtcccttcccccataagcctccatttagttctttgttatttttgtttcttccaaagcacattgaaagagaaccagtttcaggtgtttagttgcagactcagtttgtcagactttaaagaataatatgctgccaaattttggccaaagtgttaatcttaggggagagctttctgtccttttggcactgagatatttattgtttatttatcagtgacagagttcactataaatggtgtttttttaatagaatataattatcggaagcagtgccttccataattatgacagttatactgtcggttttttttaaataaaagcagcatctgctaataaaacccaacagatactggaagttttgcatttatggtcaacacttaagggttttagaaaacagccgtcagccaaatgtaattgaataaagttgaagctaagatttagagatgaattaaatttaattaggggttgctaagaagcgagcactgaccagataagaatgctggttttcctaaatgcagtgaattgtgaccaagttataaatcaatgtcacttaaaggctgtggtagtactcctgcaaaattttatagctcagtttatccaaggtgtaactctaattcccattttgcaaaatttccagtacctttgtcacaatcctaacacattatcgggagcagtatcttccataatgtataaagaacaaggtagtttttacctaccacagtgtctgtatcggagacagtgatctccatatgttacactaagggtgtaagtaattatcgggaacagtgtttcccataattttcttcatgcaatgacatcttcaaagcttgaagatcgttagtatctaacatgtatcccaactcctataattccctatcttttagttttagttgcagaaacattttgtggtcattaagcattgggtgggtaaattcaaccactgtaaaatgaaattactacaaaatttgaaatttagcttgggtttttgttacctttatggtttctccaggtcctctacttaatgagatagtagcatacatttataatgtttgctattgacaagtcattttaactttatcacattatttgcatgttacctcctataaacttagtgcggacaagttttaatccagaattgaccttttgacttaaagcagagggactttgtatagaaggtttgggggctgtggggaaggagagtcccctgaaggtctgacacgtctgcctacccattcgtggtgatcaattaaatgtaggtatgaataagttcgaagctccgtgagtgaaccatcattataaacgtgatgatcagctgtttgtcatagggcagttggaaacggcctcctagggaaaagttcatagggtctcttcaggttcttagtgtcacttacctagatttacagcctcacttgaatgtgtcactactcacagtctctttaatcttcagttttatctttaatctcctcttttatcttggactgacatttagcgtagctaagtgaaaaggtcatagctgagattcctggttcgggtgttacgcacacgtacttaaatgaaagcatgtggcatgttcatcgtataacacaatatgaatacagggcatgcattttgcagcagtgagtctcttcagaaaacccttttctacagttagggttgagttacttcctatcaagccagtacgtgctaacaggctcaatattcctgaatgaaatatcagactagtgacaagctcctggtcttgagatgtcttctcgttaaggagatgggccttttggaggtaaaggataaaatgaatgagttctgtcatgattcactattctagaacttgcatgacctttactgtgttagctctttgaatgttcttgaaattttagactttctttgtaaacaaatgatatgtccttatcattgtataaaagctgttatgtgcaacagtgtggagattccttgtctgatttaataaaatacttaaacactgaaaaaaaaaaaaaaaaaaaaaaaaaaaaaaaaaaaaaaaaaaaaaaaaaaaaaaaaaaaaaaaaaaaaaaaaaaaaaaaaagtaccttctgaggcggaaagaaccagccggatctcgacttcgagcttatttatattccaaaaaaaaaaaataaaatttcaatttttaagctttcactaattccaaacccacccgctttttatagtaagtttttcacccataaataataaatacaataattaatttctcgtaaaagtagaaaatatattctaatttattgcacggtaaggaagtagatcataactcgagcatgggagatcccgtcgttttacaacgtcgtgactgggaaaaccctggcgttacccaacttaatcgccttgcagcacatccccctttcgccagctggcgtaatagcgaagaggcccgcaccgatcgcccttcccaacagttgcgcagcctgaatggcgaatggcgctttgcctggtttccggcaccagaagcggtgccggaaagctggctggagtgcgatcttcctgaggccgatactgtcgtcgtcccctcaaactggcagatgcacggttacgatgcgcccatctacaccaacgtgacctatcccattacggtcaatccgccgtttgttcccacggagaatccgacgggttgttactcgctcacatttaatgttgatgaaagctggctacaggaaggccagacgcgaattatttttgatggcgttaactcggcgtttcatctgtggtgcaacgggcgctgggtcggttacggccaggacagtcgtttgccgtctgaatttgacctgagcgcatttttacgcgccggagaaaaccgcctcgcggtgatggtgctgcgctggagtgacggcagttatctggaagatcaggatatgtggcggatgagcggcattttccgtgacgtctcgttgctgcataaaccgactacacaaatcagcgatttccatgttgccactcgctttaatgatgatttcagccgcgctgtactggaggctgaagttcagatgtgcggcgagttgcgtgactacctacgggtaacagtttctttatggcagggtgaaacgcaggtcgccagcggcaccgcgcctttcggcggtgaaattatcgatgagcgtggtggttatgccgatcgcgtcacactacgtctgaacgtcgaaaacccgaaactgtggagcgccgaaatcccgaatctctatcgtgcggtggttgaactgcacaccgccgacggcacgctgattgaagcagaagcctgcgatgtcggtttccgcgaggtgcggattgaaaatggtctgctgctgctgaacggcaagccgttgctgattcgaggcgttaaccgtcacgagcatcatcctctgcatggtcaggtcatggatgagcagacgatggtgcaggatatcctgctgatgaagcagaacaactttaacgccgtgcgctgttcgcattatccgaaccatccgctgtggtacacgctgtgcgaccgctacggcctgtatgtggtggatgaagccaatattgaaacccacggcatggtgccaatgaatcgtctgaccgatgatccgcgctggctaccggcgatgagcgaacgcgtaacgcgaatggtgcagcgcgatcgtaatcacccgagtgtgatcatctggtcgctggggaatgaatcaggccacggcgctaatcacgacgcgctgtatcgctggatcaaatctgtcgatccttcccgcccggtgcagtatgaaggcggcggagccgacaccacggccaccgatattatttgcccgatgtacgcgcgcgtggatgaagaccagcccttcccggctgtgccgaaatggtccatcaaaaaatggctttcgctacctggagagacgcgcccgctgatcctttgcgaatacgcccacgcgatgggtaacagtcttggcggtttcgctaaatactggcaggcgtttcgtcagtatccccgtttacagggcggcttcgtctgggactgggtggatcagtcgctgattaaatatgatgaaaacggcaacccgtggtcggcttacggcggtgattttggcgatacgccgaacgatcgccagttctgtatgaacggtctggtctttgccgaccgcacgccgcatccagcgctgacggaagcaaaacaccagcagcagtttttccagttccgtttatccgggcaaaccatcgaagtgaccagcgaatacctgttccgtcatagcgataacgagctcctgcactggatggtggcgctggatggtaagccgctggcaagcggtgaagtgcctctggatgtcgctccacaaggtaaacagttgattgaactgcctgaactaccgcagccggagagcgccgggcaactctggctcacagtacgcgtagtgcaaccgaacgcgaccgcatggtcagaagccgggcacatcagcgcctggcagcagtggcgtctggcggaaaacctcagtgtgacgctccccgccgcgtcccacgccatcccgcatctgaccaccagcgaaatggatttttgcatcgagctgggtaataagcgttggcaatttaaccgccagtcaggctttctttcacagatgtggattggcgataaaaaacaactgctgacgccgctgcgcgatcagttcacccgtgcaccgctggataacgacattggcgtaagtgaagcgacccgcattgaccctaacgcctgggtcgaacgctggaaggcggcgggccattaccaggccgaagcagcgttgttgcagtgcacggcagatacacttgctgatgcggtgctgattacgaccgctcacgcgtggcagcatcaggggaaaaccttatttatcagccggaaaacctaccggattgatggtagtggtcaaatggcgattaccgttgatgttgaagtggcgagcgatacaccgcatccggcgcggattggcctgaactgccagctggcgcaggtagcagagcgggtaaactggctcggattagggccgcaagaaaactatcccgaccgccttactgccgcctgttttgaccgctgggatctgccattgtcagacatgtataccccgtacgtcttcccgagcgaaaacggtctgcgctgcgggacgcgcgaattgaattatggcccacaccagtggcgcggcgacttccagttcaacatcagccgctacagtcaacagcaactgatggaaaccagccatcgccatctgctgcacgcggaagaaggcacatggctgaatatcgacggtttccatatggggattggtggcgacgactcctggagcccgtcagtatcggcggaattccagctgagcgccggtcgctaccattaccagttggtctggtgtcaaaaataataataaccgggcaggggggatccaattctgtgagcgtatggcaaacgaaggaaaaatagttatagtagccgcactcgatgggacatttcaacgtaaaccgtttaataatattttgaatcttattccattatctgaaatggtggtaaaactaactgctgtgtgtatgaaatgctttaaggaggcttccttttctaaacgattgggtgaggaaaccgagatagaaataataggaggtaatgatatgtatcaatcggtgtgtagaaagtgttacatcgactcataatattatattttttatctaaaaaactaaaaataaacattgattaaattttaatataatacttaaaaatggatgttgtgtcgttagataaaccgtttatgtattttgaggaaattgataatgagttagattacgaaccagaaagtgcaaatgaggtcgcaaaaaaactgccgtatcaaggacagttaaaactattactaggagaattattttttcttagtaagttacagcgacacggtatattagatggtgccaccgtagtgtatataggatctgctcccggtacacatatacgttatttgagagatcatttctataatttaggagtgatcatcaaatggatgctaattgacggccgccatcatgatcctattttaaatggattgcgtgatgtgactctagtgactcggttcgttgatgaggaatatctacgatccatcaaaaaacaactgcatccttctaagattattttaatttctgatgtgagatccaaacgaggaggaaatgaacctagtacggcggatttactaagtaattacgctctacaaaatgtcatgattagtattttaaaccccgtggcgtctagtcttaaatggagatgcccgtttccagatcaatggatcaaggacttttatatcccacacggtaataaaatgttacaaccttttgctccttcatattcagctgaaatgagattattaagtatttataccggtgagaacatgagactgactcgagttaccaaattagacgctgtaaattatgaaaaaaagatgtactaccttaataagatcgtccgtaacaaagtagttgttaactttgattatcctaatcaggaatatgactattttcacatgtactttatgctgaggaccgtgtactgcaataaaacatttcctactactaaagcaaaggtactatttctacaacaatctatatttcgtttcttaaatattccaacaacatcaactgaaaaagttagtcatgaaccaatacaacgtaaaatatctagcaaaaattctatgtctaaaaacagaaatagcaagagatccgtacgcggtaataaatagaaacgtactactgagatatactaccgatatagagtataatgatttagttactttaataaccgttagacataaaattgattctatgaaaactgtgtttcaggtatttaacgaatcatccataaattatactccggttgatgatgattatggagaaccaatcattataacatcgtatcttcaaaaaggtcataacaagtttcctgtaaattttctatacatagatgtggtaatatctgacttatttcctagctttgttagactagatactacagaaactaatatagttaatagtgtactacaaacaggcgatggtaaaaagactcttcgtcttcccaaaatgttagagacggaaatagttgtcaagattctctatcgccctaatataccattaaaaattgttagatttttccgcaataacatggtaactggagtagagatagccgatagatctgttatttcagtcgctgattaatcaattagtagagatgagataagaacattataataatcaataatatatcttatatcttatatcttatatcttatatcttgtttagaaaaatgctaatattaaaatagctaacgctagtaatccaatcggaagccatttgatatctataatagggtatctaatttcctgatttaaatagcggacagctatattctcggtagctactcgtttggaatcacaaacattatttacatctaatttactatctgtaatggaaacgtttcccaatgaaatggtacaatccgatacattgcattttgttatatttttttttaaagaggctggtaacaacgcatcgcttcgtttacatggctcgtaccaacaataatagggtaatcttgtatctattcctatccgtactatgcttttatcaggataaatacatttacatcgtatatcgtctttgttagcatcacagaatgcataaatttgttcgtccgtcatgataaaaatttaaagtgtaaatataactattatttttatagttgtaataaaaagggaaatttgattgtatactttcggttctttaaaagaaactgacttgataaaaatggctgtaatctctaaggttacgtatagtctatatgatcaaaaagagattaatgctacagatattatcattagtcatgttaaaaatgacgacgatatcggtaccgttaaagatggtagactaggtgctatggatggggcattatgtaagacttgtgggaaaacggaattggaatgtttcggtcactggggtaaagtaagtatttataaaactcatatagttaagcctgaatttatttcagaaattattcgtttactgaatcatatatgtattcactgcggattattgcgttcacgagaaccgtattccgacgatattaacctaaaagagttatcgggacacgctcttaggagattaaaggataaaatattatccaagaaaaagtcatgttggaacagtgaatgtatgcaaccgtatcaaaaaattactttttcaaagaaaaaggtttgtttcgtcaacaagttggatgatattaacgttcctaattctctcatctatcaaaagttaatttctattcatgaaaagttttggccattattagaaattcatcaatatccagctaacttattttatacagactactttcccatccctccgttgattattagaccggctattagtttttggatagatagtatacccaaagagaccaatgaattaacttacttattaggtatgatcgttaagaattgtaacttgaatgctgatgaacaggttatccagaaggcggtaatagaatacgatgatattaaaattatttctaataacactaccagtatcaatttatcatatattacatccggcaaaaataatatgattagaagttatatcgtcgcccgacgaaaagatcagaccgctagatctgtaattggtcccagtacatctatcaccgttaatgaggtaggaatgcccgcatatattagaaatacacttacagaaaagatatttgttaatgcctttacagtggataaagttaaacaactattagcgtcaaaccaagttaaattttactttaataaacgattaaaccaattaacaagaatacgccaaggaaagtttattaaaaataaaatacatttattgcctggtgattgggtagaagtagctgttcaagaatatacaagtattatttttggaagacagccgtctctacatagatacaacgtcatcgcttcatctatcagagctaccgaaggagatactatcaaaatatctcccggaattgccaactctcaaaatgctgatttcgacggggatgaggaatggatgatattagaacaaaatcctaaagctgtaattgaacaaagtattcttatgtatccgacgacgttactcaaacacgatattcatggagcccccgtttatggatctattcaagatgaaatcgtagcagcgtattcattgtttaggatacaagatctttgtttagatgaagtattgaacatcttggggaaatatggaagagagttcgatcctaaaggtaaatgtaaattcagcggtaaagatatctatacttacttgataggtgaaaagattaattatccgggtctcttaaaggatggtgaaattattgcaaacgacgtagatagtaattttgttgtggctatgaggcatctgtcattggctggactcttatccgatcataagtcgaacgtggaaggtatcaactttattatcaagtcatcttatgtttttaagagatatctatctatttacggttttggggtgacattcaaagatctgagaccaaattcgacgttcactaataaattggaggccatcaacgtagaaaaaatagaacttatcaaagaagcatacgccaaatatctcaacgatgtaagagacgggaaaatagttccattatctaaagctttagaggcggactatgtggaatccatgttatccaacttgacaaatcttaatatccgagagatagaagaacatatgagacaaacgctgatagatgatccagataataacctcctgaaaatggccaaagcgggttataaagtaaatcccacagaactaatgtatattctaggtacgtatggacaacaaaggattgatggtgaaccagcagagactcgagtattgggtagagttttaccttactatcttccagactctaaggatccagaaggaagaggttacattcttaattctttaacaaaaggattaacgggttctcaatattacttttcgatgctggttgccagatctcaatctactgatatcgtctgtgaaacatcacgtaccggaacactggctagaaaaatcattaaaaagatggaggatatggtggtcgacggatacggacaagtagttataggtaatacgctcatcaagtacgccgccaattataccaaaattctaggctcagtatgtaaacctgtagatcttatctatccagatgagtccatgacttggtatttggaaattagtgctctgtggaataaaataaaacagggattcgtttactctcagaaacagaaacttgcaaagaagacattggcgccgtttaatttcctagtattcgtcaaacccaccactgaggataatgctattaaggttaaggatctgtacgatatgattcataacgtcattgatgatgtgagagagaaatacttctttacggtatctaatatagattttatggagtatatattcttgacgcatcttaatccttctagaattagaattacaaaagaaacggctatcactatctttgaaaagttctatgaaaaactcaattatactctaggtggtggaactcctattggaattatttctgcacaggtattgtctgagaagtttacacaacaagccctgtccagttttcacactactgaaaaaagtggtgccgtcaaacaaaaacttggtttcaacgagtttaataacttgactaatttgagtaagaataagaccgaaattatcactctggtatccgatgatatctctaaacttcaatctgttaagattaatttcgaatttgtatgtttgggagaattaaatccaaacatcactcttcgaaaagaaacagataaatatgtagtagatataatagtcaatagattatacatcaagagagcagaaataaccgaattagtcgtcgaatatatgattgaacgatttatctcctttagcgtcattgtaaaggaatggggtatggagacattcattgaggacgaggataatattagatttactgtctacctaaatttcgttgaaccggaagaattgaatcttagtaagtttatgatggttcttccgggggcagccaacaagggaaagattagtaaattcaagattcctatctctgattatacgggatatgacgacttcaatcaaacaaaaaagctcaataagatgactgtagaactcatgaatctaaaagaattgggttctttcgatttggaaaacgtcaacgtgtatcctggagtatggaatacatacgatatcttcggtatcgaggccgctcgtgaatacttgtgcgaagccatgttaaacacctatggagaagggttcgattatctgtatcagccttgtgatcttctcgctagtttactatgtgctagttacgaaccagaatcagtgaataaattcaagttcggcgcagctagtactcttaagagagctacgttcggagacaataaagcattgttaaacgcggctcttcataaaaagtcagaacctattaacgataatagtagctgccacttttttagcaaggtccctaatataggaactggatattacaaatactttatcgacttgggtcttctcatgagaatggaaaggaaactatctgataagatatcttctcaaaagatcaaggaaatggaagaaacagaagacttttaattcttatcaataacatatttttctatgatctgtcttttaaacgatggattttccacaaatgcgcctctcaagtccctcatagaatgatacacgtataaaaaatatagcataggcaatgactccttatttttagacattagatatgccaaaatcatagccccgcttctatttactcccgcagcacaatgaaccaacacgggctcgtttcgttgatcacatttagataaaaaggcggttacgtcgtcaaaatatttactaatatcggtagttgtatcatctaccaacggtatatgaataatattaatattagagttaggtaatgtatatttatccatcgtcaaatttaaaacatatttgaacttaacttcagatgatggtgcatccatagcatttttataatttcccaaatacacattattggttacccttgtcattatagtgggagatttggctttgtgcatatctccagttgaacgtagtagtaagtatttatacaaacttttcttatccatttataacgtacaaatggataaaactactttatcggtaaacgcgtgtaatttagaatacgttagagaaaaggctatagtaggcgtacaagcagccaaaacatcaacacttatattctttgttattatattggcaattagtgcgctattactctggtttcagacgtctgataatccagtctttaatgaattaacgagatatatgcgaattaaaaatacggttaacgattggaaatcattaacggatagcaaaacaaaattagaaagtgatagaggtagacttctagccgctggtaaggatgatatatttgaattcaaatgtgtggatttcggcgcctattttatagctatgcgattggataagaaaacatatctgccgcaagctattaggcgaggtactggagacgcgtggatggttaaaaaggcggcaaaggtcgatccatctgctcaacaattttgtcagtatttgataaaacacaagtctaataatgttattacttgtggtaatgagatgttaaatgaattaggttatagcggttattttatgtcaccgcattggtgttccgattttagtaatatggaatagtgttagataaatgcggtaacgaatgttcctgtaaggaaccataacagcttagatttaacgttaaagatgagcataaacataataaacaaaattacaatcaaacttataacattaatatcaaacaatccaaaaaatgaaatcagtggagtagtaaacgcgtacataactcctggataacgtttagcagctgccgttcctattctagaccaaaaattcggtttcatgttttcgaaacggtattctgcaacaagtcgaggatcgtgttctacatatttggcggcattatccagtatctgcctattgatcttcatttcgttttcgattctggctatttcaaaataaaatcccgatgatagacctccagactttataatttcatctacgatgttcagcgccgtagtaactctaataatataggctgataagctaacatcataccctcctgtatatgtgaatatggcatgatttttgtccattacaagctcggttttaactttattgcctgtaataatttctctcatctgtaggatatctatttttttgtcatgcattgccttcaagacgggacgaagaaacgtaatatcctcaataacgttatcgttttctacaataactacatattctacctttttattttctaactcggtaaaaaaattagaatcccatagggctaaatgtctagcgatatttcttttcgtttcctctgtacacatagtgttacaaaaccctgaaaagaagtgagtatacttgtcatcatttctaatgtttcctccagtccactgtataaacgcataatccttgtaatgatctggatcatccttgactaccacaacatttcttttttctggcataacttcgttgtcctttacatcatcgaacttctgatcattaatatgctcatgaacattaggaaatgtttctgatggaggtctatcaataactggcacaacaataacaggagttttcaccgccgccatttagttattgaaattaatcatatacaactctttaatacgagttatattttcgtctatccattgtttcacattgacatatttcgacaaaaagatataaaatgcgtattccaatgcttctctgtttaatgaattactaaaatatacaaacacgtcactgtctggcaataaatgatatcttagaatattgtaacaatttattttgtattgcacatgttcgtgatctatgagttcttcttcgaatggcataggatctccgaatctgaaaacgtataaataggagttagaataataatatttgagagtattggtaatatataaactctttagcggtataattagtttttttctctcaatttctatttttagatgtgatggaaaaatgactaattttgtagcattagtatcatgaactctaatcaaaatcttaatatcttcgtcacacgttagctctttgaagtttttaagagatgcatcagttggttctacagatggagtaggtgcaacaattttttgttctacacatgtatgtactggagccattgttttaactataatggtgcttgtatcgaaaaactttaatgcagatagcggaagctcttcgccgcgactttctacgtcgtaattgggttctaacgccgatctctgaatggatactagttttctaagttctaatgtgattctctgaaaatgtaaatccaattcctccggcattatagatgtgtatacatcggtaaataaaactatagtatccaacgatcccttctcgcaaattctagtcttaaccaaaaaatcgtatataaccacggagatggcgtatttaagagtggattcttctaccgttttgttcttggatgtcatataggaaactataaagtccgcactactgttaagaatgattactaacgcaactatatagtttaaattaagcattttggaaacataaaataactctgtagacgatacttgactttcgaataagtttgcagacaaacgaagaaagaacagacctctcttaatttcagaagaaaactttttttcgtattcctgacgtctagagtttatatcaataagaaagttaagaattagtcggttaatgttgtatttcattacccaagtttgagatttcataatattatcaaaagacatgataatattaaagataaagcgctgactatgaacgaaatagctatatggttcgctcaagaatatagtcttgttaaacgtggaaacgataactgtatttttaatcacgtcagcggcatctaaattaaatataggtatatttattccacacactctacaatatgccacaccatcttcataataaataaattcgttagcaaaattattaattttagtgaaatagttagcgtcaactttcatagcttccttcaatctaatttgatgctcacacggtgcgaattccactctaacatcccttttccatgcctcaggttcatcgatctctataatatctagttttttgcgtttcacaaacacaggctcgtctctcgcgatgagatctgtatagtaactatgtaaatgataactagatagaaagatgtagctatatagatgacgatcctttaagagaggtataataactttaccccaatcagatagactgttgttatggtcttcggaaaaagaatttttataaatttttccagtattttccaaatatacgtacttaacatctaaaaaatccttaatgataataggaatggataatccgtctattttataaagaaatacatatcgcacattatacttttttttggaaatgggaataccgatgtgtctacataaatatgcaaagtctaaatattttttagagaatcttagttggtccaaattcttttccaagtacggtaatagatttttcatattgaacggtatcttcttaatctctggttctagttccgcattaaatgatgaaactaagtcactatttttataactaacgattacatcacctctaacatcatcatttaccagaatactgatcttcttttgtcgtaaatacatgtctaatgtgttaaaaaaaagatcatacaagttatacgtcatttcatctgtggtattcttgtcattgaaggataaactcgtactaatctcttctttaacagcctgttcaaatttatatcctatatacgaaaaaatagcaaccagtgtttgatcatccgcgtcaatattctgttctatcgtagtgtataacaatcgtatatcttcttctgtgatagtcgatacgttataaaggttgataacgaaaatatttttatttcgtgaaataaagtcatcgtaggattttggacttatattcgcgtctagtagatatgcttttatttttggaatgatctcaattagaatagtctctttagagtccatttaaagttacaaacaactaggaaattggtttatgatgtataatttttttagtttttatagattctttattctatacttaaaaaatgaaaataaatacaaaggttcttgagggttgtgttaaattgaaagcgagaaataatcataaattatttcattatcgcgatatccgttaagtttgtatcgtaatggcgtggtcaattacgaataaagcggatactagtagcttcacaaagatggctgaaatcagagctcatctaaaaaatagcgctgaaaataaagataaaaacgaggatattttcccggaagatgtaataattccatctactaagcccaaaaccaaacgagccactactcctcgtaaaccagcggctactaaaagatcaaccaaaaaggaggaagtggaagaagaagtagttatagaggaatatcatcaaacaactgaaaaaaattctccatctcctggagtcagcgacattgtagaaagcgtggccgctgtagagctcgatgatagcgacggggatgatgaacctatggtacaagttgaagctggtaaagtaaatcatagtgctagaagcgatctctctgacctaaaggtggctaccgacaatatcgttaaagatcttaagaaaattattactagaatctctgcagtatcgacggttctagaggatgttcaagcagctggtatctctagacaatttacttctatgactaaagctattacaacactatctgatctagtcaccgagggaaaatctaaagttgttcgtaaaaaagttaaaacttgtaagaagtaaatgcgtgcacttttttataaagatggtaaactctttaccgataataattttttaaatcctgtatcagacgataatccagcgtatgaggttttgcaacatgttaaaattcctactcatttaacagatgtagtagtatatgaacaaacgtgggaggaggcgttaactagattaatttttgtgggaagtgattcaaaaggacgtagacaatacttttacggaaaaatgcatgtacagaatcgcaacgctaaaagagatcgtatttttgttagagtatataacgttatgaaacgaattaattgttttataaacaaaaatataaagaaatcgtccacagattccaattatcagttggcggtttttatgttaatggaaactatgttttttattagatttggtaaaatgaaatatcttaaggagaatgaaacagtagggttattaacactaaaaaataaacacatagaaataagtcccgatgaaatagttatcaagtttgtaggaaaggacaaagtttcacatgaatttgttgttcataagtctaatagactatataaaccgctattgaaactgacggatgattctagtcccgaagaatttctgttcaacaaactaagtgaacgaaaggtatacgaatgtatcaaacagtttggtattagaatcaaggatctccgaacgtatggagtcaattatacgtttttatataatttttggacaaatgtaaagtccatatctcctcttccgtcaccaaaaaagttaatagcattaactatcaaacaaactgctgaagtggtaggtcatactccatcaatttcaaaaagagcttatatggcaacgactattttagaaatggtaaaggataaaaattttttagatgtagtatctaaaactacgttcgatgaattcctatctatagtcgtagatcacgttaaatcatctacggatggatgatatagatctttacacaaataattacaagaccgataaatggaaatggataagcgtatgaaatctctcgcaatgacagctttcttcggagagctaagcacattagatattatggcattgataatgtctatatttaaacgccatccaaacaataccattttttcagtggataaggatggtcagtttatgattgatttcgaatacgataattataaggcttctcaatatttggatctgaccctcactccgatatctggagatgaatgcaagactcacgcatcgagtatagccgaacaattggcgtgtgcggatattattaaagaggatattagcgaatatatcaaaactactccccgtcttaaacgatttataaaaaaataccgcaatagatcagatactcgtatcagtcgagatacagaaaagcttaaaatagctctagctaaaggcatagattacgaatatataaaagacgcttgttaataagtaaatgaaaaaaaactagtcgtttataataaaacacgatatggatgccaacgtagtatcattttctactattgcgacgtatatagacgctttagcgaagaatgcttcggaattagaacagaggtctaccgcatacgaaataaataatgaattggaactagtatttattaagccgccattgattactttgacaaatgtagtgaatatctctacgattcaggaatcgtttattcgatttaccgttactaataaggaaggtgttaaaattagaactaagattccattatctaaggtacatggtctagatgtaaaaaatgtacagttagtagatgctatagataacatagtttgggaaaagaaatcattagtgacggaaaatcgtcttcacaaagaatgcttgttgagactatcgacagaggaacgtcatatatttttggattacaagaaatatggatcctctatccgactagaattagtcaatcttattcaagcaaaaacaaaaaactttacgatagactttaagctaaaatattttctaggatccggtgcccagtctaaaagttctttgttgcacgctattaatcatccaaagtcaaggcctaatacatctctggaaatagaattcacacctagagacaatgaaacagttccatatgatgaactaataaaggaattgacgactctctcgcgtcatatatttatggcttctccagagaatgtaattctttctccgcctattaacgcgcctataaaaacctttatgttgcctaaacaagatatagtaggtttggatctggaaaatctatatgccgtaactaagactgacggcattcctataactatcagagttacatcaaacgggttgtattgttattttacacatcttggttatattattagatatcctgttaagagaataatagattccgaagtagtagtctttggtgaggcagttaaggataagaactggaccgtatatctcattaagctaatagagcctgtgaatgcaatcaatgatagactagaagaaagtaagtatgttgaatctaaactagtggatatttgtgatcggatagtattcaagtcaaagaaatacgaaggtccgtttactacaactagtgaagtcgtcgatatgttatctacatatttaccaaagcaaccagaaggtgttattctgttctattcaaagggacctaaatctaacattgattttaaaattaaaaaggaaaatactatagaccaaactgcaaatgtagtatttaggtacatgtccagtgaaccaattatctttggagaatcgtctatctttgtagagtataagaaatttagcaacgataaaggctttcctaaagaatatggttctggtaagattgtgttatataacggcgttaattatctaaataatatctattgtttggaatatattaatacacataatgaagtgggtattaagtccgtggttgtacctattaagtttatagcagaattcttagttaatggagaaatacttaaacctagaattgataaaaccatgaaatatattaactcagaagattattatggaaatcaacataatatcatagtcgaacatttaagagatcaaagcatcaaaataggagatatctttaacgaggataaactatcggatgtgggacatcaatacgccaataatgataaatttagattaaatccagaagttagttattttacgaataaacgaactagaggaccgttgggaattttatcaaactacgtcaagactcttcttatttctatgtattgttccaaaacatttttagacgattccaacaaacgaaaggtattggcgattgattttggaaacggtgctgacctggaaaaatacttttatggagagattgcgttattggtagcgacggatccggatgctgatgctatagctagaggaaatgaaagatacaacaaattaaactctggaattaaaaccaagtactacaaatttgactacattcaggaaactattcgatccgatacatttgtctctagtgtcagagaagtattctattttggaaagtttaatatcatcgactggcagtttgctatccattattcttttcatccgagacattatgctaccgtcatgaataacttatccgaactaactgcttctggaggcaaggtattaatcactaccatggacggagacaaattatcaaaattaacagataaaaagacttttataattcataagaatttacctagtagcgaaaactatatgtctgtagaaaaaatagctgatgatagaatagtggtatataatccatcaacaatgtctactccaatgactgaatacattatcaaaaagaacgatatagtcagagtgtttaacgaatacggatttgttcttgtagataacgttgatttcgctacaattatagaacgaagtaaaaagtttattaatggcgcatctacaatggaagatagaccgtctacaaaaaactttttcgaactaaatagaggagccattaaatgtgaaggtttagatgtcgaagacttacttagttactatgttgtttatgtcttttctaagcggtaaataataatatggtatgggttctgatctcccagttctaaatgcattaaataattccaatagagcgatttttgttcctataggaccttccaactgtggatactctgtattgttaatagatatattaatacttttgtcgggtaacagaggttctacgtcttctaaaaataaaagttttataacatctggcctgttcataaataaaaacttggcgattctatatatactcttattatcaaatctagccattgtcttatagatgtgagctactgtaggtgtaccatttgattttctttctaatactatatatttctctcgaagaagttcttgcacatcatctgggaataaaatactactgttgagtaaatcagttattttttttatatcgatattgatggacatttttatagttaaggataataagtatcccaaagtcgataacgacgataacgaagtatttatacttttaggaaatcacaatgactttatcagattaaaattaacaaaattaaaggagcatgtatttttttctgaatatattgtgactccagatacatatggatctttatgcgtcgaattaaatgggtctagttttcagcacggcggtagatatatagaggtggaggaatttatagatgctggaagacaagttagatggtgttctacatccaatcatatatctaaagatatacccgaagatatgcacactgataaatttgtcatttatgatatttatacgtttgattcgttcaagaataaacgattggtattcgtacaggtacctccgtcgttaggagatgatagtcatttgactaatccgttattgtcaccgtattatcgtaattcagtagccagacaaatggtcaatgatatgatttttaatcaagattcatttttaaaatatttattagaacatctgattagaagccactatagagtttctaaacatataacaatagttagatacaaggataccgaagaattaaatctaacgagaatatgttataatagagataagtttaaggcgtttgtattcgcttggtttaacggcgtttcggaaaatgaaaaggtactagatacgtataaaaaggtatctaatttgatataatgaattcagtgactgtatcacacgcgccatatactattacttatcacgatgattgggaaccagtaatgagtcaattggtagagttttataacgaagtagccagttggctgctacgagacgagacgtcgcctattcctgataagttctttatacagttgaaacaaccgcttagaaataaacgagtatgtgtgtgtggtatagatccgtatccgaaagatggaactggtgtaccgttcgaatcaccaaattttacaaaaaaatcaattaaggagatagcttcatctatatctagattaaccggagtaattgattataaaggttataaccttaatataatagacggggttataccctggaattattacttaagttgtaaattaggagaaacaaaaagtcacgcgatttactgggataagatttccaagttactgctgcagcatataactaaacacgttagtgttctttattgtttgggtaaaacagatttctcgaatatacgggccaagttagaatccccggtaactaccatagtcggatatcatccagcggctagagaccgccaattcgagaaagatagatcatttgaaattatcaacgttttactggaattagacaacaaggcacctataaattgggctcaagggtttatttattaatgctttagtgaaattttaacttgtgttctaaatggatgcggctattagaggtaatgatgttatctttgttcttaagactataggtgtcccgtcagcgtgcagacaaaatgaagatccaagatttgtagaagcatttaaatgcgacgagttagaaagatatattgagaataatccagaatgtacactattcgaaagtcttagggatgaggaagcatactctatagtcagaattttcatggatgtagatttagacgcgtgtctagacgaaatagattatttaacggccattcaagattttattatcgaggtgtcaaactgtgtagctagattcgcgtttacagaatgcggcgccattcatgaaaatgtaataaaatccatgagatctaatttttcattgactaagtctacaaatagagataaaacaagttttcatattatctttttagatacgtataccactatggatacattgatagctatgaaacgaacactattagaattaagtagatcatctgaaaatccactaaccagatcgatagacactgccgtatataggagaaaaacaactcttcgggttgtaggtactaggaaaaatccaaattgcgacactattcatgtaatgcaaccaccgcatgataatatagaagattacctattcacttacgtggatatgaacaacaatagttattacttttctctacaacaacgattggaggatttagttcctgataagttatgggaaccagggtttatttcattcgaagacgctataaaaagagtttcaaaaatattcattaattctataataaactttaatgatctcgatgaaaataattttacaacggtaccactggtcatagattacgtaacaccttgtgcattatgtaaaaaacgatcgcataaacatccgcatcaactatcgttggaaaatggtgctattagaatttacaaaactggtaatccacatagttgtaaagttaaaattgttccgttggatggtaataaactgtttaatattgcacaaagaattttagacactaactctgttttattaaccgaacgaggagaccatatagtttggattaataattcatggaaatttaacagcgaagaacccttgataacaaaactaattttgtcaataagacatcaactacctaaggaatattcaagcgaattactctgtccaagaaaacgaaagactgtagaagctaacatacgagacatgttagtagattcagtggagaccgatacctatccggataaacttccgtttaaaaatggtgtattggacctggtagacggaatgttttactctggagatgatgctaaaaaatatacgtgtactgtatcaaccggatttaaatttgacgatacaaagttcgtcgaagacagtccagaaatggaagagttaatgaatatcattaacgatatccaaccattaacggatgaaaataagaaaaatagagagctatatgaaaaaacattatctagttgtttatgcggtgctaccaaaggatgtttaacattcttttttggagaaactgcaactggaaagtcgacaaccaaacgtttgttaaagtctgctatcggtgacctgtttgttgagacgggtcaaacaattttaacagatgtattggataaaggacctaatccatttatcgctaacatgcatttgaaaagatctgtattctgtagcgaactacctgattttgcctgtagtggatcaaagaaaattagatctgacaatattaaaaagttgacagaaccttgtgtcattggaagaccgtgtttctccaataaaattaataatagaaaccatgcgacaatcattatcgatactaattacaaacctgtttttgataggatagataacgcattaatgagaagaattgccgtcgtgcgattcagaacacacttttctcaaccttctggtagagaggctgctgaaaataatgacgcgtacgataaagtcaaactattagacgaggggttagatggtaaaatacaaaataatatatatagatttgcatttctatacttgttggtgaaatggtacaaaaaatatcatgttcctattatgaaactatatcctacacccgaagagattcctgactttgcattctatctcaaaataggtactctgttggtatctagctctgtaaagcatattccattaatgacggacctctccaaaaagggatatatattgtacgataatgtggtcactcttccgttgactactttccaacagaaaatatccaagtattttaattctagactatttggacacgatatagagagcttcatcaatagacataagaaatttgccaatgttagtgatgaatatctgcaatatatattcatagaggatatttcatctccgtaaatatatgctcatatatttatagaagatatcacatatctaaatgaataccggaatcatagatttatttgataatcatgttgatagtataccaactatattacctcatcagttagctactctagattatctagttagaactatcatagatgagaacagaagcgtgttattgttccatattatgggatcaggtaaaacaataatcgctttgttgttcgccttggtagcttccagatttaaaaaggtttacattctagtgccgaacatcaacatcttaaaaattttcaattataatatgggtgtagctatgaacttgtttaatgacgaattcatagctgagaatatctttattcattccacaacaagtttttattctcttaattataacgataacgtcattaattataacggattatctcgctacaataactctatttttatcgttgatgaggcacataatatctttgggaataatactggagaacttatgaccgtgataaaaaataaaaacaagattccttttttactattgtctggatctcccattactaacacacctaatactctgggtcatattatagatttaatgtccgaagagacgatagattttggtgaaattattagtcgtggtaagaaagtaattcagacacttcttaacgaacgcggtgtgaatgtacttaaggatttgcttaaaggaagaatatcatattacgaaatgcctgataaagatctaccaacgataagatatcacggacgtaagtttctagatactagagtagtatattgtcacatgtctaaacttcaagagagagattatatgattactagacgacagctatgttatcatgaaatgtttgataaaaatatgtataacgtgtcaatggcagtattgggacaacttaatctgatgaataatttagatactttatttcaggaacaggataaggaattgtacccaaatctgaaaataaataatggcgtgttatacggagaagaattggtaacgttaaacattagttccaaatttaaatactttattaatcggatacagacactcaacggaaaacattttatatacttttctaattctacatatggcggattggtaattaaatatatcatgctcagtaatggatattctgaatataatggttctcagggaactaatccacatatgataaacggcaaaccaaaaacatttgctatcgttactagtaaaatgaaatcgtctttagaggatctattagatgtgtataattctcctgaaaacgatgatggtagtcaattgatgtttttgttttcatcaaacattatgtccgaatcctatactctaaaagaggtaaggcatatttggtttatgactatcccagatactttttctcaatacaaccaaattcttggacgatctattagaaaattctcttacgccgatatttctgaaccagttaatgtatatcttttagccgccgtatattccgatttcaatgacgaagtgacgtcattaaacgattacacacaggatgaattaattaatgttttaccatttgacatcaaaaagctgttgtatctaaaatttaagacgaaagaaacgaatagaatatactctattcttcaagagatgtctgaaacgtattctcttccaccacatccatcaattgtaaaagttttattgggagaattggtcagacaatttttttataataattctcgtattaagtataacgataccaagttacttaaaatggttacatcagttataaaaaataaagaagacgctaggaattacatagatgatattgtaaacggtcacttctttgtatcgaataaagtatttgataaatctcttttatacaaatacgaaaacgatattattacagtaccgtttagactttcctacgaaccatttgtttggggagttaactttcgtaaagaatataacgtggtatcttctccataaaactgatgagatatataaagaaataaatgtcgagctttgttaccaatggatacctttccgttacattggaaccacacgagctgacgttagacataaaaactaatattaggaatgccgtatataagacgtatctccatagagaaattagtggtaaaatggccaagaaaatagaaattcgtgaagacgtggaattacctctcggcgaaatagttaataattctgtagttataaacgttccgtgtgtaataacctacgcgtattatcacgttggggatatagtcagaggaacattaaacatcgaagatgaatcaaatgtaactattcaatgtggagatttaatctgtaaactaagtagagattcgggtactgtatcatttagcgattcaaagtactgcttttttcgaaatggtaatgcgtatgacaatggcagcgaagtcactgccgttctaatggaggctcaacaaggtatcgaatctagttttgtttttctcgcgaatatcgtcgactcataaaaaagagaatagcggtaagtataaacacgaatactatggcaataattgcgaatgttttattctcttcgatatatttttgataatatgaaaaacatgtctctctcaaatcggacaaccatctcataaaatagttctcgcgcgctggagaggtagttgccgctcgtataatctctccagaataatatacttgcgtgtcgtcgttcaatttatacggatttctatagttctctgttatataatgcggtttgccctcatgattagacgacgacaatagtgttctaaatttagatagttgatcagaatgaatgtttattggcgttggaaaaattatccatacagcgtctgcagagtggttgatagttgttcctagatatgtaaaataatccaacttactaggcagcaaattgtctagataaaatactgaatcaaacggtgcagacgtattggcggatctaatggaatccaattgattaactatcttttgaaaatatacatttttatgatccaatacttgtaagaatatagaaataatgataagtccatcatcgtgtttttttgcctcttcataagaactatattttttcttattccaatgaacaagattaatctctccagagtatttgtacacatctatcaagtgattggatccataatcgtcttcctttccccaatatatatgtagtgatgataacacatattcattggggagaaaccctccacttatatatcctcctttaaaattaatccttactagttttccagtgttctggatagtggttggtttcgactcattataatgtatgtctaacggcttcaatcgcgcgttagaaattgcttttttagtttctatattaataggagatagttgttgcggcatagtaaaaatgaaatgataactgtttaaaaatagctcttagtatgggaattacaatggatgaggaagtgatatttgaaactcctagagaattaatatctattaaacgaataaaagatattccaagatcaaaagacacgcatgtgtttgctgcgtgtataacaagtgacggatatccgttaataggagctagaagaacttcattcgcgttccaggcgatattatctcaacaaaattcagattctatctttagagtatccactaaactattacggtttatgtactacaatgaactaagagaaatctttagacggttgagaaaaggttctatcaacaatatcgatcctcactttgaagagttaatattattgggtggtaaactagataaaaaggaatctattaaagattgtttaagaagagaattaaaagaggaaagtgatgaacgtataacagtaaaagaatttggaaatgtaattctaaaacttacaacacgggataaattatttaataaagtatatataagttattgcatggcgtgttttattaatcaatcgttggaggatttatcgcatactagtatttacaatgtagaaattagaaagattaaatcattaaatgattgtattaacgacgataaatacgaatatctgtcttatatttataatatgctagttaatagtaaatgaacttttacagatctagtataattagtcagattattaagtataatagacgactagctaagtctattatttgcgaggatgactctcaaattattacactcacggcattcgttaaccaatgcctatggtgtcataaacgagtatccgtgtccgctattttattaactactgataacaaaatattagtatgtaacagacgagatagttttctctattctgaaataattagaactagaaacatgtttagaaagaaacgattatttctgaattattccaattatttgaacaaacaggaaagaagtatactatcgtcatttttttctctagatccagctactactgataatgatagaatagacgctatttatccgggtggcatacccaaaaggggtgagaatgttccagagtgtttatccagggaaattaaagaagaagttaatatagacaattcttttgtattcatagacactcggttttttattcatggcatcatagaagataccattattaataaattttttgaggtaatcttctttgtcggaagaatatctctaacgagtgatcaaatcattgatacatttaaaagtaatcatgaaatcaaggatctaatatttttagatccgaattcaggtaatggactccaatacgaaattgcaaaatatgctctagatactgcaaaacttaaatgttacggccatagaggatgttattatgaatcattaaaaaaattaactgaggatgattgattaaaaaatataaattaatttaccatcgtgtatttttataacgggattgtccggcatatcatgtagatagttaccgtctacatcgtatactcgaccatctacgcctttaaatcctctatttattgacattaatctattagaattggaataccaaatattagtaccctcaattagtttattggtaatattttttttagacgatagatcgatggctcttgaaaccaaggttttccaaccggactcattgtcgatcggtgagaagtctttttcattagcatgaatccattctaatgatgtatgtttaaacactctaaacaattggacaaattcttttgatttgctttgaatgatttcaaataggtcttcgtctacagtaggcataccattagataatctagccattataaagtgcacgtttacatatctacgttctggaggagtaagaacgtgactattgagacgaatggctcttcctactatctgacgaagagacgcctcgttccatgtcatatctaaaatgaagatatcattaattgagaaaaaactaataccctcgcctccactagaagagaatacgcatgttttaatgcattctccgttagtgtttgattcttggttaaactcagccaccgccttgattctagtatcttttgttctagatgagaactctatattagagataccaaagactttgaaatatagtaataagatttctattcctgactgattaacaaatggttcaaagactagacatttaccatgggatgctaatattcccaaacatacatctataaatttgacgcttttctcttttaattcagtaaatagagagatatcagccgcactagcatcccctttcaatagttctccctttttaaaggtatctaatgcggatttagaaaactctctatctcttaatgaatttttaaaatcattatatagtgttgctatctcttgcgcgtattcgcccggatcacgattttgtctttcaggaaagctatcgaacgtaaacgtagtagccatacgtctcagaattctaaatgatgatatacctgtttttatttcagcgagtttagccttttgataaatttcttcttgctttttcgacatattaacgtatcgcattaatactgttttcttagcgaatgatgcagacccttctacgtcatcaaaaatagaaaactcgttattaactatatacgaacatagtcctcctagtttggagactaattctttttcatcgactagacgtttattctcaaatagcgattggtgttgtaaggatcctggtcgtagtaagttaaccaacatggtgaattcttgcacactattgacgataggtgtagccgataaacaaatcatcttatggttttttaacgcaatggtcttagataaaaaattatatactgaacgagtaggacggatcttaccatcttctttgattaatgatttagaaatgaagttatgacattcatcaataatgacgcatattctactcttggaattaatagttttgatattagtaaaaaatttatttctaaaattttgatcatcgtaattaataaaaatacaatccttcgttatctctggagcgtatctgagtatagtgttcatccaaggatcttctatcaaagcctttttcaccaataagataatagcccaattcgtataaatatccttaagatgtttgagaatatatacagtagtcattgttttaccgacacccgtttcatggaacaataaaagagaatgcatactgtctaatcctaagaaaactcttgctacaaaatgttgataatccttgaggcgtactacgtccgaccccatcatttcaacgggcatattagtagttctgcgtaaggcataatcgatataggccgcgtgtgatttactcatttatgagtgataagtaataactatgttttaaaaatcacagcagtagtttaactagtcttctctgatgtttgttttcgatactttttgaatcagaagtcatactagaataaagcaacgagtgaacgtaatagagagcttcgtatactctattcgaaaactctaagaacttattaatgaattccgtatccactggattgtttaaaatactaaattgaacactgttcacatccttccaagaagaagacttagtgacggacttaacatgagacataaataaatccaaattttttttacaaacatcactagccaccataatggcgctatctttcaaccagctatcgcttacgcattttagcagtctaacatttttaaagagactacaatatattctcatagtatcgattacacctctaccgaataaagttggaagtttaataatacaatatttttcgtttacaaaatcaaataatggtcgaaacacgtcgaaggttaacatcttataatcgctaatgtatagattgttttcagtgagatgattattagatttaatagcatctcgttcacgtttgaacagtttattgcgtgcgctgaggtcggcaactacggcgtccgctttagtactcctcccataatactttacgctattaatctttaaaatttcatagactttatctagatcgctttctggtaacatgatatcatgtgtaaaaagttttaacatgtcggtcggcattctatttagatcattaactctagaaatctgaagaaagtaattagctccgtattccagactaggtaatgggcttttacctagagacagattaagttctggcaatgtttcataaaatggaagaaggacatgcgttccctcccggatattttttacaatttcatccatttacaactctatagtttgttttcattattattagttattatctcccataatcttggtaatacttaccccttgatcgtaagataccttatacaggtcattacatacaactaccaattgtttttgtacataatagattggatggttgacatccatggtggaataaactactcgaacagatagtttatctttccccctagatacattagccgtaatagttgtcggcctaaagaatatctttggtgtaaagttaaaagttagggttcttgttccattattgctttttgtcagtagttcattataaattctcgagatgggtccgttctctgaatatagaacatcatttccaaatctaacttctagtctagaaataatatcggtcttattcttaaaatctattcccttgatgaagggatcgttaatgaacaaatccttggcctttgattcggctgatctattatctccgttatagacgttacgttgactagtccaaagacttacaggaatagatgtatcgatgatgttgatactatgtgatatgtgagcaaagattgttctcttagtggcatcactatatgttccagtaatggcggaaaactttttagaaatgttatatataaaagaattttttcgtgttccaaacattagcagattagtatgaagataaacactcatattatcaggaacattatcaatttttacatacacatcagcatcttgaatagaaacgataccatcttctggaacctctacgatctcggcagactccggataaccagtcggtgggccatcgctaacaataactagatcatccaacaatctactcacatatgcatctatataatctttttcatcttgtgagtaccctggatacgaaataaatttattatccgtatttccataataaggtttagtataaacagagagagatgttgccgcatgaacttcagttacagtcgccgttggttggtttatttgacctattactctcctaggtttctctataaacgatggtttaatttgtacattcttaaccatatatccaataaagctcaattcaggaacataaacaaattctttgttgaacgtttcaaagtcgaacgaagagtcacgaataacgatatcggatactggattgaaggttaccgttacggtaatttttgaatcggatagtttaagactgctgaatgtatcttccacatcaaacggagttttaatataaacgtatactgtagatggttctttaatagtgtcattaggagttaggccaatagaaatatcattaagttcactagaatatccagagtgtttcaaagcaattgtattattgatacaattattatataattcttcgccctcaatttcccaaataacaccgttacacgaagagatagatacgtgattaatacatttatatccaacatatggtacgtaactgaatcttcccatacctttaacttctggaagttccaaactcagaaccaaatgattaagcgcagtaatatactgatccctaatttcgaagctagcgatagcctgattgtctggaccatcgtttgtcataactccggatagagaaatatattgcggcatatacaaagttggaatttgactatcgactgcgaagacattagaccgtttaatagagtcatccccaccgatcaaagaattaatgatagtattattcattttctatttaaaatggaaaaagcttacaataaactccgtagagaaatatctataatttgtgagttttccttaaagtaacagcttccgtaaacgccgtctttatctcttagtaggtttattgtatttatgaccttttccttatcttcatagaatactaaaggcaacaaagaaatttttggttcttctctaagagctacgtgagacttaaccatagaagccaacgaatccctacatattttagaacagaaataccctacttcaccacccttgtatgtctcaatactaataggtctaaaaaccaaatcttgattacaaaaccaacacttatcaattacactatttgtcttaatagacacatctgccatagatttataatactttggtagtatacaagcgagtgcttcttctttagcgggcttaaagactgctttaggtgctgaaataaccacatctggaaggcttactcgcttagccatttaattacggaactatttttttatacttctaatgagcaagtagaaaacctctcatctacaaaaacgtactcgtgtccataatcctctaccatagttacacgttttttagatctcatatgtgctaaaaagttttcccatactaattggttactattatttttcgtataatttttaacagtttgaggttttagatttttagttacagaagtgatatcgaatattttatccaaaaagaatgaataattaattgtcttagaaggagtgttttcttggcaaaagaataccaagtgcttaaatatttctactacttcattaatcttttctgtactcagattcagtttctcatcttttacttgattgattatttcaaagactaacttataatcctttttatttattctctcgttagccttaagaaaactagatacaaaatttgcatctacatcatccgtggatatttgatttttttccatgatatccaagagttccgagataatttctccagaacattgatgagacaataatctccgcaatacatttctcaaatgaataagtttattagacacgtggaagtttgactttttttgtacctttgtacatttttgaaataccgactcgcaaaaaatacaatattcatatccttgttcagatactataccgttatgtctacaaccgctacataatcgtagattcatgttaacactctacgtatctcgtcgtccaatattttatataaaaacattttatttctagacgttgccagaaaatcctgtaatatttttagttttttgggctgtgaataaagtatcgccctaatattgttaccgtcttccgccaatatagtagttaaattatccgcacatgcagaagaacaccgcttaggcggattcagtacaatgttatatttttcgtaccaactcatttaaatatcataatctaaaatagttctgtaatatgtctagcgctaatatattgatcataatcctgtgcataaattaagatacaacaatgtctcgaaatcatcgacatggcttcttccatagttagaagatcgtcgtcaaagttagcaacgtgattcatcaacatttgctgttttgaggcagcaaatactgaaccgtcgccattcaaccattcataaaaaccatcgtctgaatccattgataatttcttgtactggtttttgagagctcgcatcaatctagcatttctagctcccggattgaaaacagaaagaggatcgtacatccagggtccattttctgtaaatagaatcgtataatgtcccttcaagaagatatcagacgatccacaatcaaagaattggtctccgagtttgtaacaaactgcggactttaacctatacatgataccgtttagcataatttctggtgatacgtcaatcggagtatcatctattagagatctaaagccggtgtaacattctccaccaaacatattcttattctgacgtcgttctacataaaacatcattgctccattaacgataacaggggaatgaacagcactacccatcacattagttcccaatggatcaatgtgtgtaactccagaacatcttccatagcctatgttaggaggagcgaacaccactcttccactattgccatcgaatgccatagaataaatatccttggaattgatagaaatcggactgtcggatgttgtgatcatcttcataggattaacaactatgtatggtgccgcctgaagtttcatatcgtaactgatgccgtttataggtctagccacagaaaccaacgtaggtctaaatccaactatagacaaaatagaagccaatatctgttcctcatctgtcataacttgagagcatccagtatgaataatcttcattagatggggatctaccgcatcatcatcgttacaataaaaaattcccattctaatgttcataattgcttttctaatcatggtatgcatgtttgctctctgaatctctgtggaaattagatctgatacacctgtaatcactatcggattatcctccgtaagacgattaaccaacaacatataattataagactttacttttctaaattcataaagttgctggattaggctataggtgtctccatgtacatacgcgttctcgagcgcaggaagtttaataccgaatagtgccatcagaataggatgaatatagtaattagtttctggttttctataaataaaagacaaatcttgtgaactagacatatcggtaaaatgcatggattggaatcgtgtagtcgacagaagaatatgatgattagatggagagtatattttatctaactctttgagttggtcaccgattctaggactagctcgagaatgaataagtactaaaggatgagtacatttcacagaaacactagcattgttcaatgtgctctttacatgggtaaggagttgaaatagctcgtttctatttgttctgacaatatttagtttattcataatgttaagcatatcctgaatagtaaagttagatgtgtcatacttgttagtagttagatatttagcaattgcattcccatcatttctcaatctcgtactccaatcatgcgtggatgctacttcgtcgatggaaaccatacaatcctttttgataggctgttgagattgatcatttcctgcacgtttaggtttggtacgttgatttctagcccctgcggatataaagtcatcgtctacaatttgggacaatgaattgcatacactacaagacaaagatttatcagaagtgtgaatatgatcttcatctaccaaagaaagagtttgattagtataactagattttagtcctgcgttagatgttaaaaaaacatcgctattgaccacggcttccattatttatattcgtagtttttactcgaaagcgtgattttaatatccaatcttattacttttggaatcgttcaaaacctttgactagttgtagaatttgatctattgccctacgcgtatactcccttgcatcatatacgttcgtcaccagatcgtttgtttcggcctgaagttggtgcatatctctttcaacattcgacatgagatccttaagggccatatcgtctagattttgttgagatgctgctcctggatttggattttgttgtgctgttgtacatactgtaccaccagtaggtgtaggagtacatacagtggccacaataggaggttgagaaagtgtaaccgttggagtagtacaagaaatacttccatccgattgttgtgtacatgtagttgttggtaacgtctgagaaggttgggtagatggcggcgtcgtcgttttttgatctttattaaatttagagataatatcctgaacagcattgctcggcgtcaacgctggaaggagtgaactcgccggcgcatcagtatcttcagacagccaatcaaaaagattagacatatcagatgatgtattagtttgttgtcgtggttttggtgtaggagcagtactactaggtagaagaataggagccgatgtagctgttggaaccggctgtggagttatatgaatagttggttgtagcggttggataggctgtctgctggcggccatcatattatctctagctagttgttctcgcaactgtctttgataatacgactcttgagactttagtcctatttcaatcgcttcatcctttttcgtatccggatccttttcttcagaataatagattgacgactttggtgtagaggattctgccagcctctgtgagaacttgttaaagaagtccatttaaggctttaaaattgaattgcgattataagattaaatggcagacacagacgatattatcgactatgaatccgatgatctcaccgaatacgaggatgatgaagaagaggaagaagatggagagtcactagaaactagtgatatagatcccaaatcttcttataagattgtagaatcagcatccactcatatagaagatgcgcattccaatcttaaacatatagggaatcatatatctgctcttaaacgacgctatactagacgtataagtctatttgaaatagcgggtataatagcagaaagctataacttgcttcaacgaggaagattacctctagtttcagaattttctgacgaaacgatgaagcaaaatatgctacatgtaattatacaagagatagaggagggttcttgtcctatagtcatcgaaaagaacggagaattgttgtcggtaaacgattttgacaaagatggtctaaaattccatctagactatattatcaaaatttggaaacttcaaaaacgatattagaatttatacgaatatcgttctctaaatgtcacaatcaagtctcgcatgttcagcaatttattgtcgtactttatatcgtgttcattaacgatatcttgcaaaatagtaatgattctatcttccttcgatagatattcttcagagattattgtcttatattctttcttgttatcagatatgaatttgataagactttgaacattattgatacccgtctgtttaattttttctacagatattttagttttggcagattctatcgtatctgtcaatagacatccaacatcgacattcgacgtcaattgtctataaatcaacgtataaattttagaaataacattagcgaattgttgtgcgttgatgtcgttattctgaaacagtatgattttaggtagcattttcttaacaaagagaacgtatttattgttactcagttgaacagatgatatatccagattactaacgcatctgattccgtataccaaactttcagaagaaatggtatacaattgtttgtattcattcaatgtctctttttcagaaattagtttagagtcgaatactgcaataattttcaagagatagttttcatcagataagattttatttagtgtagatatgataaaactattgttttgttggagaacttgatacgccgcgttctctgtagtcgacgctctcaaatgggaaacaatctccattatttttttggaatcggatactatatcttcggtatcttgacgcagtctagtatacatagagttaagagagattagagtttgtacattaagcaacatgtctctaaatgtggctacaaacttttcctttttcacatcatctagtttattatataccgatttcacaacggcaccagatttaaggaaccagaatgaaaaactctgataactacaatatttcatcatagttacgattttatcatcttctatagttggtgtaatagcgcatacctttttctccaagactggaaccaacgtcataaaaatgtttaaatcaaaatccatatcaacatctgatgcgctaagaccagtctcgcgttcaagattatctttactaatggtgacgaactcatcgtataaaactctaagtttgtccattatttatttacagatttagttgtttaatttatttgtgctcttccagagttgggatagtatttttctaacgtcggtattatattattaggatctacgttcatatgtatcataatattaatcatccacgttttgataaatctatctttagcttctgaaataacgtatttaaacaaaggagaaaaatatttagctacggcatcagacgcaataacattttttgtaaatgtaacgtatttagacgacagatcttcgttaaaaagttttccatctatgtagaatccatcggttgttaacaccattcccgcgtcagattgaataggagtttgaatagtttgttttggaaatagatccttcaataacttatagttgggtgggaaaaaatcgattttatcactagactctttcttttttactatcattacctcatgaactatttcttgaatgagtatatgtattttctttcctatatcggacgcgttcattggaaaatataccatgtcgttaactataagaatatttttatcctcgtttacaaactgaataatatcagatgtagttcgtaaacgaactatatcatcaccagcacaacatctaactatatgatatccactagtttcctttagccgtttattatcttgttccatattagcagtcattccatcatttaagaaggcgtcaaaaataatagggagaaatgacattttggattctgttacaactttaccaaaattaaggatatacggacttactatctttttctcaacgtcaatttgatgaacacacgatgaaaatgtgcttctatgagattgatcatgtagaaaacaacaagggatacaatatttccgcatatcatgaaatatattaagaaatcccaccttattatatttccccaaaggatccatgcacgtaaacattatgccgttatcattaataaagacttctttctcatcggatctgtaaaagttgttactgatttttttcattccaggatctagataattaataatgatgggttttctattcttattctttgtattttggcatatcctagaccagtaaacagtttccactttggtaaaatcagcagacttttgaacgctattaaacatggcattaatggcaataactaaaaatgtaaaatatttttctatgttaggaatatggtttttcactttaatagatatatggtttttggccaaaatgatagatatttttttatccgaggatagtaaaatattattagtcgccgtctctataaaaatgaagctagtctcgatatccaattttattctagaattgataggagtcgccaaatgtaccttatacgttatatctcccttgatgcgttccatttgtgtatctatatcggacacaagatctgtaaatagttttacgttattaatcatcacggtatcgccgtcgctagataacgctaatgtaccatccaagtcccaaatggagagatttaactgttcatcgtttagaataaaatgattaccggtcatattaataaagtgttcatcgtatctagataacaacgacttataattaatgtccaagtcttgaactcgctgaatgatcttttttaacccagttagttttagattggtacgaaatatattgttaaactttgattctacagtaatgtccaaatctagttgtggaaatacttccatcaacattgtttcaaacttgataatattattatctacatcttcgtacgatccaaattccggaatagatgtatcgcacgctctggccacccagataaccaaaaagtcacacgctccaggatatacattgtataaaaagctatcgttttttagtagggtttttttctgcgtgtatacgaagggattaaaaatagtattatcaacgtaactatattccaaattattcttatgagaatagataataatatcgtccttaatatctaacaaatttcctaaatatccctttaattgagtcattcgaagcgtcaatagaatatgtctcttaactatttccggctgttgtatatttaaatgacttcgtaaaaaataatatatgggcgacttctcatctatgtaatcatatggagtgagatatagggctcgttctacctcctgccccttacccacctgtaataccaattgcggacttactatatatcgcatatttatatcgtggggtaaagtgaaaatctactaccgatgatgtaagtcttacaatgttcgaaccagtaccagatcttaatttggaggcctccgtagaactaggggaggtaaatatagatcaaacaacacctatgataaaggagaatagcggttttatatcccgcagtagacgtctattcgcccatagatctaaggatgatgagagaaaactagcactacgattctttttacaaagactttattttttagatcatagagagattcattatttgttcagatgcgttgacgctgtaaaagacgtcactattaccaaaaaaaataacattatcgtggcgccttatatagcacttttaactatcgcatcaaaaggatgcaaacttacagaaacaatgattgaagcattctttccagaactatataatgaacatagtaagaaatttaaattcaactctcaagtatccatcatccaagaaaaactcggataccagtttggaaactatcacgtttatgattttgaaccgtattactctacagtagctctggctattcgagatgaacattcatctggcatttttaatatccgtcaagagagttatctggtaagttcattatctgaaataacatatagattttatctaattaatctaaaatctgatcttgttcaatggagtgctagtacgggcgctgtaattaatcaaatggtaaatactgtattgattacagtgtatgaaaagttacaactggtcatagaaaatgattcacaatttacatgttcattggctgtggaatcaaaacttccaataaaattacttaaagatagaaatgaattatttacaaaattcattaacgagttaaaaaagaccagttcattcaagataagcaaacgcgataaggatacgctactaaaatattttacttaggactggagttagaatttatagacgactcatttcgtttatcattgttactattattactattactatcattattagtgttggcattattagtattcttcttgtcatcttgttcagaaatatacagcaatgctatacctaatactaaatacattatcatgctcgcaatggctctaacaacaacgaaccaaaatgaatttggtcgtagcttttgttcacaaaaatacataaagaaatgtctacataaatctatggcgccattggctacttgaaatagcgccagtcctcctacagattttaatatagctgtataacatgacatttattcatcatcaaaagagacagagtcaccatctgtcatatttagattttttttcatgtgttcaaagtatcctctactcatttcattataatagtttatcatacttagaattttaggacggatcaatgagtaagacttgactagatcgtcagtagtaatttgtgcatcgtctattctgcatccgcttcgtcgaataatgtatagcatcgctttgagattctccatagctatcaagtctttatacaatgacatggaaatatctgtgaatactttatacttctccaacatcgatgccttaacatcatcgcctactttagcattgaaaatacgttctattgtgtagatggatgtagcaagatttttaaacaacaatgccatcttacacgatgattgcctcaagtctccaatcgtttgtttagaacgattagctacagagtccaatgcttggctgactagcatattattatctttagaaattgtattcttcaatgaggcgtttatcatatctgtgatttcgttagtcatattacagtctgactgggttgtaatgttatccaacatatcacctatggatacggtacacgtaccagcatttgtaataatcctatctaagatgttgtatggcattgcgcagaaaatatcttctcctgtaatatctccactctcgataaatctactcagattattcttaaatgccttattctctggagaaaagatatcagtgtccatcatttcattaatagtatacgcagaaaagataccacgagtatcaattctatccaagatacttatcggttccgagtcacagataatggtttcctctccttcgggagatcctgcatagaaatatctaggacaatagtttctatactgtctgtaactctgataatctctaaagtcactaactgataccatgaaattgagaagatcaaacgctgaagtaattaatttttctgcctcgtttttactacaactagttttcatcaatgtagtgacgatgtattgtttagttacttttggtctaatactgatgatagagatattattgcttcccataatggatcttctagtagtcaccttaaagcccattgatgcgaatagcagatagataaagtcttggtatgactcctttctaatatagtacggactacctttgtcacccaactttatacccacataagccataacaacctctttaatagccgtttcatgaggtttatcagccatgagcctgagtagttggaagaatctcatgaatcccgtctcagaaagtcctatatgcatgatagatttatctttcctgggaaactctcgtatagtcatagatgaaatactctttaaagtttctgaaataagattagtaacagtcttacctccgactactctaggtaacaaacaaactctaataggtgttttctctgcggagataatatcagaaaggatagagcaataagtagtattattgtgattataaagaccgaatacataacaggtagaatttataaacatcatgtcctgaaggtttttagacttgtattcctcgtaatccataccgtcccaaaacatggatttggtaactttgatagccgtagatctttgttccttcgccaacaggttaaagaaattaataaagaatttgttgtttctatttatgtccacaaattgcacgtttggaagcgccacggttacattcactgcagcattttgaggatcgcgagtatgaagtacgatgttattgtttactggtatatctggaaagaaatctaccagtctaggaataagagattgatatcgcatagaaatagtaaagtttataatctcatcatcgaagagcattttgttaccattgtaataaatatccactctgtcatatgtataaatgaagtactgttcaaacatgatgagatgtttatatgttggcatagtagtgagatcgacgtttggtaatggcaatgtattaagattaactccataatgtctagcagcatctgcgatgttataagcgtcgtcaaagcggggtcgatcttgtattgttatatattgtctaacacctataagattatcaaaatcttgtctgcttaatacaccgttaacaatttttgccttgaattcttttattggtgcattaataacatccttatagaggatgttaaacaaataagtgttatcaaagttaagatctggatatttcttttctgctagaacatccattgagtcggagccatctggtttaatataaccaccgataaatctagctctgtattctgtatccgtcaatctaatattaagaaggtgttgagtgaaaggtggaagatcgtaaaagctgtgagtattaatgataggattagtttccgaactaatgttaattggggtattaataatatctatatttccagcgttaagtgtaacattaaacagttttaattcacgtgacgtggtatcaattaaataattaatgcccaatttggatatagcagcctgaagctcatcttgtttagttacggatcctaatgagttattaagcaatatatcgaacggatgaacgaaggttgttttaagttggtcacatactttgtaatctagacatagatgcggaagaacggtagaaactatacgaaataaatattcagagtcctctaattgatcaagagtaactattgacttaataggcatcatttatttagtattaaatgacgaccgtaccagtgacggatatacaaaacgatttaattacagagttttcagaagataattatccatctaacaaaaattatgaaataactcttcgtcaaatgtctattctaactcacgttaacaacgtggtagatagagaacataatgccgccgtagtgtcatctccagaggaaatatcctcacaacttaatgaagatctatttccagatgatgattcaccggccactattatcgaacgagtacaacctcatactactattattgacgatactccacctcctacgtttcgtagagagttattaatatcggaacaacgtcaacaacgagaaaaaagatttaatattacagtatcgaaaaatgctgaagcaataatggaatctagatctatgataacttctatgccaacacaaacaccatccttgggagtagtttatgataaagataaaagaattcagatgttagaggatgaagtggttaatcttagaaatcaacgatctaatacaaaatcatctgataatttagataattttaccaaaatactatttggtaagactccgtacaaatcaacagaagttaataagcgtatagccatcgttaattatgcaaatttgaacgggtcccccttatcagtcgaggacttggatgtttgttcggaggatgaaatagatagaatctataaaacgattaaacaatatcacgaaagtagaaaacgaaaaattatcgtcactaacgtgattattattgtcataaacattatcgagcaggcattgctaaaactcggatttgaagaaatcaaaggactgagtaccgatatcacttcagaaattatcgatgtggagatcggagatgactgcgatgctgtagcatctaaactaggaatcggtaacagtccggttcttaatattgtattgtttatactcaagatattcgttaaacgaattaaaattatttaatttaatacattcccatatccagacaacaatcgtctggattaatctgttcctgtcgtctcataccggacgacatattaatctttttattagtgggcatctttttagatggtttctttttcccagcattaactgagtcgatacctagaagatcgtgattgatctctccgaccattccacgaacttctaattggccgtctctgacggtaccataaactattttaccagcattagtaacagcttggacaatctgaccatccatcgcattgtacgatgtagtagtaactgttgttctacgtctaggagcaccagaagtatttttggagcccttggatgttgatgtagaagaagacgaggattttgattttggtttacatgtaatacattttgaactctttgattttgtatcacatgcgccggcagtcacatctgtttgagaattaagattattgttgcctcctttgacggctgcatctccaccgatttgcgctagtagatttttaagctgtggtgtaatcttattaactgtttcgatataatcatcgtaactgcttctaacggctaaattttttttatccgccatttagaagctaaaaatatttttatttatgcagaagatttaactagattatacaatgaactaatatgatccttttccagattatttacaaacttggtattttttggttctggaggaggcgaatttaaattcggacttggattcggattttgtaagttcttgatcttattatacatcgagtataggatggcgacagtaactgctacacaaataccgatcaaaagaagaataccaatcatttattgacaataacttcactattgatcaagtatgcaatatatcatcttttcactaaataagtagtaataatgattcaacaatgtcgagatatatggacgataataatttagttcatggaaatatcgctatgattggtgtgaatgactccgctaactctgtggggtgcgcagtgctttccccacatagaataaattagcattccgactgtgataataataccaagtataaacgccataatactcaatactttccatgtacgagtgggactggtagacttactaaagtcaataaaggcgaagatacacgaaagaatcaaaagaatgattccagcgattagcacgccggaaaaataatttccaatcataagcatcatgtccatttaactaataaaaattttaaatcgccgaatgaacaaagtggaatataaaccatataaaaacaatagtttgtactgcaaaaataatatctatttttgttttcgaagatatggtaaaattaaatagtagtacacagcatgttataactaacagcagcaacggctcgtaattacttatcatttactagacgaaaaggtggtgggatattttcttgctcaaataatacgaatatatcacccatccattttatgcgatgtttatatactctaatctttaatagatctatagacgacgggtttaccaacaatatagattttatcgattcatctaatttaaacccttccttaaacgtgaatgatctattatctggcataacgatgaccctacctgatgaatcggacaatgtactgggccatgtagaataaattatcaacgaattatcgtctacgaacatttatatcatttgttttaattttaggacgcgaataaatggatataaaatagaaaataacagatattacaaccagtgttatggccgcgcccaaccaggtaggcagttttattttatcttttactacaggttctcctggatgtacgtcaccaacggcggacgtagttctagtacaattagacgtaagttccgcttgggaattttttaacgctaaagagttaacgttaatcgtgcacccaacgtatttacatctagttcgttgaacatcttgattataatataaccattttctatctctagattcgtcagtgcactcatgtaaccaacataccctaggtcctaaatatttatctccggaattagattttggataattcgcgcaccaacaatttctatttcctttatgatcgttacaaaagacgtataatgccgtatccccaaaagtaaaataatcaggacgaataattctaataaactcagaacaatatctcgcatccatatgtttggagcaaatatcggaataagtagacatagccggtttccgttttgcacgtaaccattctaaacaattggggtttccaggatcgtttctacaaaatccagtcatgaaatcgtcacaatgttctgtcttgtaattattattaaatatttttggacagtgtttggtatttgtcttagaacaacattttgccacgctatcactatcgcccaggagataatccttttttataaaatgacatcgttgcccggatgctatataatcagtagcgtgttttaaatccttaatatattcaggagttacctcgttctgataatagattaatgatccaggacgaaatttgaaagaactacatggttctccatgaattaatacatattgtttagcaaattcaggaactataaaactactacaatgatctatcgacataccatctatcaaacaaaacttgggtttaatttctcccggagatgtttcataatagtacgtataactttcttctgcaaacttaacagctctattatattcaggataattaaaacctaattccatatatttgtctcgtatatctgctattcctggtgctattttgattctattaagagtaacagctgcccccattcttaataatcgtcagtatttaaactgttaaatgttggtatatcaacatctaccttatttcccgcagtataaggtttgttgcaggtatactgttcaggaatggttacatttatacttcttctatagtcctgtctttcgatgttcatcacatatgcaaagaacagaataaacaaaataatgtaagaaataatattaaatatctgtgaattcgtaaatacattgattgccataataattacagcagctacaatacacacaatagacattcccacagtgttgccattacctccacgatacatttgagttactaagcaataggtaataactaagctagtaagaggcaatagaaaagatgagataaatatcatcaatatagagattagaggagggctatatagagccaagacgaacaaaatcaaaccgagtaacgttctaacatcattatttttgaagattcccaaataatcattcattcctccataatcgttttgcatcatacctccatctttaggcataaacgattgctgctgttcctctgtaaataaatctttatcaagcactccagcacccgcagagaagtcgtcaagcatattgtaatatcttaaataactcatttatatattaaaaaatgtcactattaaagatggagtataatctttatgccgaactaaaaaaaatgacttgtggtcaacccctaagtctttttaacgaagacggggatttcgtagaagttgaaccgggatcatcctttaagtttctgatacctaagggattttacgcctctccttccgtaaagacgagtctagtattcgagacattaacaacgaccgataataaaatcactagtatcaatccaacaaatgcgccaaagttatatcctcttcaacgcaaagtcgtatctgaagtagtttctaatatgaggaaaatgatcgaatcaaaacgtcctctatacatcactcttcacttggcgtgtggatttggtaagactattaccacgtgttatcttatggctacacacggtagaaaaaccgtcatttgcgtacccaataaaatgttaatacatcaatggaagacacaggtagaggcagtcggattggaacataagatatccatagatggagtaagtagtctattaaaggaactaaagactcaaagtccggatgtattaatagtagtcagtagacatctgacaaacgatgccttttgtaaatatatcaataagcattatgatttgttcatcttggatgaatcacatacgtataatctgatgaacaatacagcagttacaagatttttagcgtattatcctccgatgatgtgttattttttaactgctacacctagaccatctaaccgaatttattgtaacagtattattaatattgccaagttatccaatctaaaaaaaactatctatgcagtagatagtttttttgagccatattccacagataatattagacatatggtaaaacgactagatggaccatctaataaatatcatatatataccgagaagttattatctgtagacgagcctagaaatcaacttattcttgataccctggtagaagaattcaagtcaggaactattaatcgcattttagttattactaaactacgtgaacatatggtattattctacaaacgattattagattttttcggaccagaggttgtatttataggagacgcccaaaatagacgtactccagatatggtcaaatcaatcaaggaactaaatagatttatattcgtatccaccttattttattccggtactggtttagatattcctagtttggattcgttgttcatttgctcggcagtaatcaacaatatgcaaatagagcaattactagggagggtatgtcgagaaacagaactattagataggacggtatatgtatttcctaacacatccatcaaagaaataaagtacatgataggaaatttcatgcaacgaattattagtctgtctgtagataaactaggatttaaacaaaaaagttatcggaaacatcaagaatccgatcccacttctgcatgtacaacatcatccagagaagaacgtgtattaaatagaatatttaactcgcaaaatcgttaagaagtttaagcgacgatccgcatgctgcgcaggccagtgtattacccctcatagtattaatataatccaatgatacttttgtgatgtcggaaatcttaaccaatttagactgacaggcagaacacgtcatgcaatcatcatcgtcatcgataactgtagtcttgggcttctttttgcgactcttcattccggaacgcacattggtgctatccatttaggtagtaaaaaataagtcagaatatgccctataacacgatcgtgcaaaacctggtatatcgtctctatctttatcacaatatagtgtatcgacatttttattattattgacctcgtttatcttggaacatggaatgggaacatttttgttatcaacggccatctttgccttaattccagatgttgtaaaattataactaaacagtctatcatcgacacaaatgaaattcttgtttagacgtttgtagtttacgtatgcggctcgttcgcgtctcattttttcagatattgcaggtactataatattaaaaataagaatgaaataacataggattaaaaataaagttatcatgacttctagcgctgatttaactaacttaaaagaattacttagtctgtacaaaagtttgagattttcagattctgcggctatagaaaagtataattctttggtagaatggggaacatctacttactggaaaataggcgtgcaaaaggtagctaatgtcgagacgtcaatatctgattattatgatgaggtaaaaaataaaccgtttaatattgatccgggctattacattttcttaccggtatattttgggagcgtctttatttattcgaagggtaaaaatatggtagaacttggatctggaaactcttttcaaataccagatgatatgcgaagtgcgtgtaacaaagtattagacagcgataacggaatagactttctgagatttgttttgttaaacaatagatggataatggaagatgctatatcaaaatatcagtctccagttaatatatttaaactagctagtgagtacggattaaacatacccaaatatttagaaattgaaatagaggaagacacattatttgacgacgagttatactctattatagaacgctctttcgatgataaatttccaaaaatatccatatcgtatattaagttgggagaacttagacggcaagttgtagactttttcaaattctcattcatgtatattgagtccatcaaggtagatcgtataggagataatatttttattcctagcgttataacaaaatcaggaaaaaagatattagtaaaagatgtagaccatttaatacgatccaaggttagagaacatacatttgtaaaagtaaaaaagaaaaacacattttccattttatacgactatgatggaaacggaacagaaactagaggagaagtaataaaacgaattatagacactataggacgagactattatgttaacggaaagtatttctctaaggttggtagtgcaggcttaaagcaattgactaataaattagatattaatgagtgcgcaactgtcgatgagttagttgatgagattaataaatccggaactgtaaaacgaaaaataaaaaaccaatcagcatttgatttaagcagagaatgtttgggatatccagaagcggattttataacgttagttaataacatgcggttcaaaatagaaaattgtaaggttgtaaatttcaatattgaaaatactaattgtttaaataacccgagtattgaaactatatatggaaactttaaccagttcgtctcaatctttaatgtcgtcaccgatgtcaaaaaaagattattcgagtgaaataatatgcgcctttgatataggtgcaaaaaatcctgccagaactgttttagaagtcaaggataactccgttagggtattggatatatcaaaattagactggagttctgattgggaaaggcgcatagctaaagatttgtcacaatatgaatacactacagttcttctagaacgtcagcctagaaggtcgccgtatgttaaatttatctattttattaaaggctttttatatcatacatcggctgccaaagttatttgcgtctcgcctgtcatgtctggtaattcatatagagatcgaaaaaagagatcggtcgaagcatttcttgattggatggacacattcggattgcgagactccgttccggatagacgcaaattagacgatgtagcggatagtttcaatttggctatgagatacgtattagataaatggaatactaattatacaccttataataggtgtaaatctagaaattacataaaaaaaatgtaataacgttagtaacgccattatggataatctatttacctttctacatgaaatagaagatagatatgccagaactatttttaactttcatctaataagttgcgatgaaataggagatatatatggtcttatgaaagaacgcatttcctcagaggatatgtttgataatatagtgtataataaagatatacatcctgccattaagaaactagtgtattgcgacatccaacttactaaacacattattaatcagaatacgtatccggtatttaacgattcttcacaagtgaaatgttgtcattatttcgacataaactcagataatagcaatattagctctcgtacagtagagatatttgagagggaaaagtcatctcttgtatcatatattaaaactaccaataagaagagaaaggtcaattacggcgaaataaagaaaactgttcatggaggcactaatgcaaattacttttccggtaaaaagtctgacgagtatctgagtactacagttagatccaacattaatcaaccttggatcaaaaccatctctaagaggatgagagttgatatcattaatcactctatagtaacgcgtggaaaaagctctatattacaaactatagaaattatttttactaatagaacatgtgtgaaaatattcaaggattctactatgcacattattctatccaaggacaaggatgaaaaggggtgtatacacatgattgacaaattattctatgtctattataatttatttctgttgttcgaagatatcatccaaaacgagtactttaaagaagtagctaatgttgtaaaccacgtactcacggctacggcattagatgagaaattattcctaattaagaaaatggctgaacacgatgtttatggagttagcaatttcaaaatagggatgtttaacctgacatttattaagtcgttggatcataccgttttcccctctctgttagatgaggatagcaaaataaagttttttaaggggaaaaagctcaatattgtagcattacgatctctggaggattgtataaattacgtgactaaatccgagaatatgatagaaatgatgaaggaaagatcgactattttaaatagcatagatatagaaacggaatcggtagatcgtctaaaagaattgcttctaaaatgaaaaaaaacactaattcagaaatggatcaacgactagggtataagtttttggtgcctgatcctaaagccggagttttttatagaccgttacatttccaatatgtatcgtattctaattttatattgcatcgattgcatgaaatcttgaccgtcaagcggccactcttatcgtttaagaataatacagaacgaattatgatagaaattagcaatgttaaagtgactcctccagattactcacctataatcgcgagtattaaaggtaagagttatgacgcattagccacgttcactgtaaatatctttaaagaggtaatgaccaaagagggtatatccatcactaaaataagtagttatgagggaaaagattctcatttgataaaaattccgctactaataggatacgggaataaaaatccacttgatacagccaagtatcttgttcctaatgtcataggtggagtctttatcaataaacaatctgtcgaaaaagtaggaattaatctagtagaaaagattacaacatggccaaaatttagggttgttaagccaaactcattcactttctcgttttcctccgtatcccctcctaatgtattaccgacaagatatcgccattacaagatatctctggatatatcacaattggaagcgttgaatatatcatcgacaaagacatttataacggtcaatattgttttgctgtctcaatatttatctagagtgagtctagaattcattagacgtagtttatcatacgatatgcctccagaagttgtctatctagtaaacgcgataatagatagtgctaaacgaattactgaatctattactgactttaatattgatacatacattaatgacctggtggaagctgaacacattaaacaaaaatctcagttaacgatcaacgagttcaaatatgaaatgctgcataactttttacctcatatgaactatacacccgatcaactaaagggattttatatgatatctttactaagaaagtttctctactgtatcttccacacttctagatatccagatagagattcgatggtttgtcatcgcatcctaacgtacggcaaatattttgagacgttggcacatgatgaattagagaattacataggcaacatccgaaacgatatcatgaacaatcacaagaacagaggcacttacgcggtaaacattcatgtactaacaactcccggacttaatcacgcgttttctagcttattgagtggaaagttcaaaaagtcagacggtagttatcgaacacatcctcactattcatggatgcagaatatttctattcctaggagtgttggattttatccggatcaagtaaagatttcaaagatgttttctgtcagaaaataccatccaagtcaatatctttacttttgttcatcagacgttccggaaagaggtcctcaggtaggtttagtatctcaattgtctgtcttgagttccattacaaatatactaacgtctgagtatttggatttggaaaagaaaatttgtgagtatatcagatcatattataaagatgatataagttactttgaaacaggatttccaatcactatagaaaatgctctagtcgcatctcttaatccaaatatgatatgtgattttgtaactgactttagacgtagaaaacggatgggattcttcggtaacttggaggtaggtattactttagttagggatcacatgaatgaaattcgcattaatattggagcgggaagattagtcagaccattcttggttgtggataacggagagctcatgatggatgtgtgtccggagttagaaagcagattagacgacatgacattctctgacattcagaaagagtttccgcatgtcatcgaaatggtagatatagaacaatttacttttagtaacgtatgtgaatcggttcaaaaatttagaatgatgtcaaaggatgaaagaaagcaatacgatttatgtgactttcctgccgaatttagagatggatatgtagcatcttcattagtgggaatcaatcacaattctggacccagagctattcttggatgtgctcaagctaaacaagctatctcttgtctgagctcggatatacgaaataaaatagacaatggaattcatttgatgtatccagagaggccaatcgtgattagtaaggctttagaaacttcaaagattgcggctaattgcttcggccaacatgttactatagcattaatgtcgtacaaaggtatcaatcaagaggatggaattatcatcaaaaaacaatttattcagagaggcggtctcgatattgttacagccaagaaacatcaagtagaaattccattggaaaactttaataacaaagaaagagataggtctaacgcctattcaaaattagaaagtaatggattagttagactgaatgctttcttggaatccggagacgctatggcacgaaatatctcatcaagaactcttgaagatgattttgctagagataatcagattagcttcgatgtttccgagaaatataccgatatgtacaaatctcgcgttgaacgagtacaagtagaacttactgacaaagttaaggtacgagtattaaccatgaaagaaagaagacccattctaggagacaaatttaccactagaacgagtcaaaagggaacagtcgcgtatgtcgcggatgaaacggaacttccatacgacgaaaatggtatcacaccagatgtcattattaattctacatccatcttctctagaaaaactatatctatgttgatagaagttattttaacagccgcatattctgctaagccgtacaacaataagggagaaaaccgacctgtctgttttcctagtagtaacgaaacatccatcgatacatatatgcaattcgctaaacaatgttatgagcattcaaatccgaaattgtccgatgaagaattatcggataaaatcttttgtgaaaagattctctatgatcctgaaacggataagccttatgcatccaaagtattttttggaccaatttattacttgcgtctgaggcatttaactcaggacaaggcaaccgttagatgtagaggtaaaaagacgaagctcattagacaggcgaatgagggacgaaaacgtggaggaggtatcaagttcggagaaatggagagagactgtttaatagcgcatggtgcagccaatactattacagaagttttgaaagattcggaagaagattatcaagatgtgtatgtttgtgaaaattgtggagacatagcagcacaaatcaagggtattaatacatgtcttagatgttcaaaacttaatctctctcctctcttaacaaaaattgataccacgcacgtatctaaagtatttcttactcaaatgaacgccagaggcgtaaaagtcaaattagatttcgaacgaaggcctccttcgttttataaaccattagataaagttgatctcaagccgtcttttctggtgtaatattctagtttggtagtagatacatatcaatatcatcaaattcgagatccgaattataaaatgggcgtggattgttaactatagaatcggacgtctgatattcgaaaatctgtggagtttcaggttttggtggaggtgtaactgctacttgggatactgaagtctgatattcagaaagctgtggatgttctggttcggcatccaccgatggtgtcacatcactaatcggttcggtaacgtctgtggatggaggtgctacttctacagaacctgtagcctcagttgtcaacggagatacatttttaatgcgagaaaatgtataatttggtaatggtttcttatgtggatctgaagaagaggtaagatatctactagaaagataccgatcacgttctagttctcttttgtagaacttaactttttctttctccgcatctagttgatattccaacctcttcacgttactacgttcagattccaattcacgttcgcatgggttacctccgcagtttttacgagcgatttcacgttcagccttcatgcgtctctccctctctctatcgagtttatcagagcagtctttctgaaggcgatcgaactccataaatttctccaacgctttgattgtttccatagatttccgaagttcagcttttaggactgtgattctttttctttcgaattcacagctggatgtacaaccgtttccattaccgccatctctaagtttcttttctagatcggcaacatttcatccccatgccttttacattcctcgagtctactgtcgtcgaaatatcgttccagctccttttcgacatcaataactttagcacgttgtctctcaagctctcttttgtagttatctgattccctggcacgtttaagatcttcatgcaattgagtcagctcttaacttcctctcttgcttcttcgtcatagtacgcgcaatcactgtgagatccattgttaccacgtctacactcggcgagctcgcgtttaagagattcaatttcccgtttgtattggtccatgtttccattgctaccaccattagatttacaggctgctagttgtcgttcgagatcagaaatacgggttttcttggaattgatttcgtcgatgtacttggcatcgaaacacttattaagttctttttccaattctacgattttatttctttcgcgagtcaattccctcctgtagtaactatctgttttgtcagattcacgctctctacgtagactttcttgcaagttactaatttgttccctagcacgtccgagtttagttttatatgctgaatagagttctgattcatcctttgagcagatctctagcgatcgtttaagattcctaattctagtctttagcctatttacctcctcagaagatgttccgttaccgttgcgtttacactcgttaagctgtctatcaagatccatgattctatctctaagacgttgcatctctctttccatatcagcattgctttcattattacgtctgcagtcactcaactgtctttcaatatctgagattctatctctaagacgtcgcatctctctctgtttcggcattggtttcattattacgtttacagtcgttcaactgtctttcaagatctgatattctagattggagtctgctaatctctgtagcattttcacggcattcactcagttgtctttcaagatctgaaattttagattggagtctgctaatctctgtaagatttcctcctccgctctcgatgcagtcggtcaacttattctctagttctctaatacgcgaacgcagtgcatcaacttcttgcgtgtcttcctggttgcgtgtacattcatcgagatctctaacgcgtcgtcgttcttcctcaagttctctgcgtactacagaaagcgtgtccctatcttgttgatatttagcaatttctgattctagagtactgattttgcttacgtagttactaatagttgtcttggccttatcaagatcctccttgtatttgtcgcattccttgatatccctacgaagtctggacagttcccattcgacattacgacgtttatcgatttcagctcggagatcgtcatcgcgttgttttagccacatacgactgagttcaagttctcgttgacaagatccatctacttttccattcctaatagtatccagttccttttctagttctgaacgcatttctcgttccctatcaagcgattctctcaattctcggatagtcttcttatcaatttctaataaatctgaaccatcatctgtcccattttgaatatccctgtgttctttgatctcttttgtaagtcggtcgattctttcggttttataaacagaatccctttccaaagtcctaatcttactgagtttatcactaagttctgcattcaattcggtgagttttctcttggcttcttccaactctgttttaaactctccactatttccgcattcttcctcgcatttatctaaccattcaattagtttattaataactagttggtaatcagcgattcctatagccgttcttgtaattgtgggaacataattaggatcttctaatggattgtatggcttgatagcatcatctttatcattattagggggatggacaaccttaattggttggtcctcatctcctccagtagcgtgtggttcttcaataccagtgttagtaataggcttaggcaaatgcttgtcgtacgcgggcacttcctcatccatcaagtatttataatcgggttctacttcagaatattcttttctaagagacgcgacttcgggagttagtagaagaactctgtttctgtatctatcaacgctggaatcaatactcaagttaaggatagcgaatacctcatcgtcatcatccgtatcttctgaaacaccatcatatgacatttcatgaagtctaacgtattgataaatagaatcagatttagtattaaacagatccttaacctttttagtaaacgcatatgtatattttagatctccagatttcataatatgatcacatgccttaaatgtcagtgcttccatgatataatctggaacactaatgggtgacgaaaaagatacagcaccatatgctacgttgataaataaatctgaaccactaagtagataatgattaatgttaagaaagaggaaatattcagtgtataggtatgtcttggcgtcatatcttgtactaaacacgctaaacagtttgttaatgtgatcaatttccaatagattaattagagcagcgggaataccaacaaacatattaccacatccgtattttctatgaatatcacatatcatgttaaaaaatcttgatagaagagcgaatatctcgtctgacttaatgagtcgtagttcagcagcaacataagtcataactgtaaatagaacatactttcctgtagtgttgattctagactccacatcaacaccattattaaaaatagttttatatacatctttaatctgctctccgttaatcgtcgaacgttctagtatacggaaacactttgatttcttatctgtagttaatgacttagtgatatcacgaagaatattacgaattacatttcttgtttttcttgagagacctgattcagaactcaactcatcgttccatagtttttctacctcagtggcgaaatctttggagtgcttggtacatttttcaataaggttcgtgacctccatttattataaaaaatttattcaaaacttaactacaatcgggtaattataagatcgtagatctcccatgtggcggaatactaccatctatcgcatgtggatggacagtaggtaatggccatgggaacagtaatgtttgcatatttatctttcttgctagtattactgcatattgtcccaatgtttcgatgtgatgttctaacctatcaactgccgctgtatcacaacaatagtgtccgatgaaattaagattatgatccaatgtgtttaatatatgattatcaagtcttatacgatccgcgtcttttttgacaggatcaggttcttctacaggaagaagtttcggcctcttatgatattcatgtctgggaaacggtggtctagggtgaggctccggtatcggagtgggttttggattataatcatcatcgtctatgacatcatcttcgacttcgatatttattttgctatcttgatgatgtcctgtatcagttgcattttcagcactcgactgaatattagcgcattcattgtctattattaccatatttctaaacccaaaatgtatgtgttgaacatcagtactatcgttgatgagtcttatagcatgaattcgcttatcgttatcgggtttatcttctgtcaccttagcaattccttttttattaaactctacataatcatatccatttctattgtttgttctaatataaacgagtatagcatcattgctaaatttttcaatagtatcaaaaacagaatatcctaaaccatataatatatattcaggaacactcaaactaaatgtccaggattctcctaaatacgtaaactttaatagtgcgaaatcattcaaaaatctaccacttatagatagatagtacataaatgcgtatagtagtctacctatctctttattatgaaaaccggcattacgatcatatatgtcgtgatatacctgtgatccgtttacgttaaaccataaatacatgggtgatcctataaacatgaatttatttctaattctcagagctatagttaattgaccgtgtaatatttgcttacatgcatacttgatacgcttattaataagatttttatcattgctcgttatttcagaatcgtatatataaggagtaccatcgtgattcttaccagatattatacaaaatactatatataaaatatattgacccacgttagtaatcatataaatgtttaacgttttaaattttgtattcaatgatccattatcatacgctatcatggtcttgtaatattcattctttaaaatataatattgtgttagccattgcattggagctcctaatggagattttctattctcatccattttaggataggctttcataaagtccctaataacttcgtgaataatgtttctatgttttctactgatgcatgtatttgcttcgatttttttatcccatgtttcatctatcatagatttaaacgcagtaatgctcgcaacattaacatcttgaaccgttggtacaattccgttccataaatttataatgttcgccatttatataactcattttttgaatatacttttaattaacaaaagagttaagttactcatatggacgccgtccagtctgaacatcaatctttttagccagagatatcatagccgctcttagagtttcagcgtgattttccaacctaaatagaacttcatcgttgcgtttacaacacttttctatttgttcaaactttgttgttacattagtaatctttttttccaaattagttagccgttgtttgagagtttcctcattgtcgtcttcatcggctttaacaattgcttcgcgtttagcctctggctttttagcagcctttgtagaaaaaaattcagttgctggaattgcaagatcgtcatctccggggaaaagagttccgtccatttaaagtacagattttagaaactgacactctgcgttatttatatttggtacaacacatggattataaatattgatgttaataacatcagaaaatgtaaagtctatacattgttgcatcgtgttaaattttctaatggatctagtattattgggtccaacttctgcctgaaatccaaatatggaagcggatacaaaaccgtttcctggataaaccacacatctccacttttgctttacatcagaaattgtgtcgttgacatcttgaactctcctatctaatgccggtgttccacctatagattttgaatattcgaatgctgcatgagtagcattaaattccttaatattgccataattttcatatattgagtaaccctggataaaaagtaaacacaccgcagccgtcgctaccacaataaaaaaaattgatagagagttcatttataatctattagaagctgacaaaatttttttacacgcatcagacaatgctttaataaatagttcaacatctacttttgtcatatcgaaccgatggtatgattctaacctagaattacatccgaaaaagttgactatgttcatagtcattaagtcattaacaaacaacattccagactctggattataagacgatactgtttcgtcacaattacctaccttaatcatgtgattatgaatattggctattagagcaccttctaagaaatctataatatctttgaaacacgatttaaaatcaaaccacgaatatacttctacgaagaaagttagtttacccataggagaaataactataaatggagatctaaatacaaaatccggatctatgatagttttaacattattatattctctattaaatacctccacatctaaaaatgttaattttgaaactatgtcttcgtttattaccgtacctgaactaaacgctataagctctattgtttgagaactctttaaacgatattcttgaaatacatgtaacaaagtttcctttaactcggtcggtttatctaccatagttacagaatttgtatccttatctataatataataatcaaaatcgtataaagttatataattatcgcgttcagattgtgatcttttcaaatagactaaaaaccccatttctctagtaagtatcttatgtatatgtttgtaaaatatcttcatggtgggaatatgctctaccgcagttagccattcctcattgacagcggtagatgtattagacaaaactattccaatgtttaacaagggccattttacgagattattaaatccttgtttgataaatgtagccaatgagggttcgagttcaacgacgattgaattctcttcccgcggatgctgcatgatgaacgacgggatgttgttcgattgatttggaattctttttcgactttttgtttatattaaatattttaaaatttatagcggatagcaattcatgtaccacggataatgtagacgcgtattgcgcatcgatatctttattattagataaatttatcaataaatgtgagaagtttgcctcgttaaggtcttccatttaaatattatataaacatttgtgtttgtatcttattcgtcttttatggaatagttttttactagtaaagctgcaattacacactttgtccgtaaaacataaatataaacaccagcttttatcaatcgttccaaaaagtcgacggcggacatttttaacatggcatctattttaaatacacttaggtttttggaaaaaacatcattttataattgtaacgattcaataactaaagaaaagattaagattaaacataagggaatgtcatttgtattttataagccaaagcattctaccgttgttaaatacttgtctggaggaggtatatatcatgatgatttggttgtattggggaaggtaacaattaataatctaaagatgatgctattttacatggatttatcatatcatggagtgacaagtagtggagcaatttacaaattgggatcgtctatcgatagactttctctaaataggactattgttacaaaagttaataattatgatgatacattttttgacgacgatgattgatcgctattgcacaattttgtttttgtactttctaatatagtgtttaggttctttttcatatgagaatattgatttactaaaatatctatgtttaacttttgttctatgacgtccttatcggcggtatcggtacatatacgtaattcaccttcacaaaatacggagtcttcgataataatagccaatcgattattggatctagctgtctgtatcatattcaacatgtttaatatatcctttcgtttcccctttacaggcatcgatcgtagcatattttccgcgtctgatatggaaatgttaaaactacaaaaatgcgtaatgttagcccgtcctaatattggtacgtgtctataagtttggcatagtagaataatagacgtgtttaaatgccttccaaagtttaagaattctattagagtattgcattttgatagtttatcgcctacatcatcaaaaataagtaaaaagtgtgctgattttttatgattttgtgcgacagcaatacatttttctatgttacttttagttcgtatcagattatattctagagattcctgactactaacgaaattaatatgatttggccaaatgtatccatcataatctgggttataaacgggtgtaaacaagaatatatgtttatattttttaactagtgtagaaaacagagatagtaaatagatagtttttccagatccagatcctcctgttaaaaccattctaaacggcatttttaataaattttctcttgaaaattgtttttcttggaaacaattcataattatatttacagttactaaattaatttgataataaatcaaaatatggaaaactaaggttgttagtagggaggagaacaaagaaggcacatcgtgatataaataacatttattatcatgatgacaccagaaaacgacgaagagcagacatctgtgttctccgctactgtttacggagacaaaattcagggaaagaataaacgcaaacgcgtgattggtctatgtattagaatatctatggttatttcactactatctatgattaccatgtccgcgtttctcatagtgcgcctaaatcaatgcatgtctgctaacgaggctgctattactgacgccgctgttgccgttgctgctgcatcatctactcatagaaaggttgcgtctagcactacacaatatgatcacaaagaaagctgtaatggtttatattaccagggttcttgttatatattacattcagactaccagttattctcggatgctaaagcaaattgcactgcggaatcatcaacactacccaataaatccgatgtcttgactacctggctcattgattatgttgaggatacatggggatctgatggtaatccaattacaaaaactacatccgattatcaagattctgatgtatcacaagaagttagaaagtatttttgtgttaaaacaatgaactaatatttatttttgtacattaataaatgaaatcgcttaatagacaaactgtaagtaggtttaagaagttgtcggtgccggccgctataatgatgatactctcaaccattattagtggcataggaacatttctgcattacaaagaagaactgatgcctagtgcttgcgccaatggatggatacaatacgataaacattgttatttagatactaacattaaaatgtctacagataatgcggtttatcagtgtcgtaaattacgagctagattgcctagacctgatactagacatctgagagtattgtttagtattttttataaagattattgggtaagtttaaaaaagaccaatgataaatggttagatattaataatgataaagatatagatattagtaaattaacaaattttaaacaactaaacagtacgacggatgctgaagcgtgttatatatacaagtctggaaaactggttaaaacagtatgtaaaagtactcaatctgtactatgtgttaaaaaattctacaagtgacaacaaaaaatgaattaataataagtcgttaacgtacgccgccatggacgccgcgtttgttattactccaatgggtgtgttgactataacagatacattgtatgatgatctcgatatctcaatcatggactttataggaccatacattataggtaacataaaaactgtccaaatagatgtacgggatataaaatattccgacatgcaaaaatgctactttagctataagggtaaaatagttcctcaggattctaatgatttggctagattcaacatttatagcatttgtgccgcatacagatcaaaaaataccatcatcatagcatgcgactatgatatcatgttagatatagaagataaacatcagccattttatctattcccatctattgatgtttttaacgctacaatcatagaagcgtataacctgtatacagctggagattatcatctaatcatcaatccttcagataatctgaaaatgaaattgtcgtttaattcttcattctgcatatcagacggcaatggatggatcataattgatgggaaatgcaatagtaattttttatcataaaagttgtaaagtaaataataaaacaataaatattgaactagtagtacgtatattgagcaatcagaaatgatgctggtacctcttatcacggtgaccgtagttgcgggaacaatattagtatgttatatattatatatttgtaggaaaaagatacgtactgtctataatgacaataaaattatcatgacaaaattaaaaaagataaagagttctaattccagcaaatctagtaaatcaactgatagcgaatcagactgggaggatcactgtagtgctatggaacaaaacaatgacgtagataatatttctaggaatgagatattggacgatgatagcttcgctggtagtttaatatgggataacgaatccaatgttatggcgcctagcacagaacacatttacgatagtgttgctggaagcacgctgctaataaataatgatcgtaatgaacagactatttatcagaacactacagtagtaattaatgaaacggagactgttgaagtacttaatgaagataccaaacagaatcctaactattcatccaatcctttcgtaaattataataaaaccagtatttgtagcaagtcaaatccgtttattacagaacttaacaataaatttagtgagaataatccgtttagacgagcacatagcgatgattatcttaataagcaagaacaagatcatgaacacgatgatatagaatcatcggtcgtatcattggtgtgattagtttcctttttataaaattgaagtaatatttagtattattgctgccgtcacgttgtacaaatggagatattccctgtattcggcatttctaaaattagcaattttattgctaataatgactgtagatattatatagatacagaacatcaaaaaattatatctgatgagatcaatagacagatggatgaaacggtacttcttaccaacatcttaagcgtagaagttgtaaatgacaatgagatgtaccatcttattcctcatagattatcgacgattatactctgtattagttctgtcggaggatgtgttatctctatagataatgacatcaatggcaaaaatattctaacctttcccattgatcatgctgtaatcatatccccactgagtaaatgtgtcgtagttagcaagggtcctacaaccatattggttgttaaagcggatatacctagcaaacgattggtaacatcgtttacaaacgacatactatatgtaaacaatctgtcactgattaattatttgccgttgtctgtattcattattagacgagtcaccgactatttggatagacacatatgcgatcagatatttgctaataataagtggtattcccttataaccatcgacgataagcaatatcctattccatcaaactgtataggtatgtcctctgccaagtacataaattctagcatcgagcaagatactttaatccatgtttgtaacctcgagcatccgttcgactcagtatacaaaaaaatgcagtcgtacaattctctacctatcaaggaacaaatattgtacggtagaattgataatataaatatgagcattagtatttctgtggattaatagatttctagtatggggatcattaatcatctctaatctctaaatacctcataaaacgaaaaaaaagctattatcaaatactgtacggaatggattcattctcttctctttttatgaaactctgttgtatatctactgataaaactggaagcaaaaaatctgatagaaagaataagaataagatcaaggattatatggaacacgattattataaaataacaatagttcctggttcctcttccacgtctactagctcgtggtattatacacatgcctagtaatagtctctttgcgttgacggaaagcagactagaaataacaggctaaaatgttcagacaccataatagttcccaacccagataataacagagttccatcaacacattcctttaaactcaatcccaaacccaaaaccgttaaaatgtatccggccaattgatagtagataatgaggtgtacagcgcatgataatttacacagtaaccaaaatgaaaatactttagtaattataagaaatatagacggtaatgtcatcatcaacaatccgataatatgcctgagagtaaacattgacggataaaacaaaaatgctccgcataactctatcatggcaataacacaaccaaatacttgtaagattcctaaattagtagaaaatacaacgaatatcgatgtataagtgatctcgagaaataataagaataaagtaatgcccgtaaagataaacatcaacattgtttggtaatcattaaaccaattagtatgaagttgaactaatttcacagtagattttattccagtgttatcctcgcatgtataagtacctggtaagatatctttatattccataatcaatgagacatcactatctgataacgaatgaagtctagcactagtatgccatttacttaatattgtcgtcttggaagttttattataagttaaaatatcatggttatccaatttccatctaatatactttgtcggattatctatagtacacggaataatgatggtatcattacatgctgtatactctatggtctttgtagttgttataacaaccaacgtatagaggtatatcaacgatattctaactcttgacattttttatttatttaaaatgatacctttgttatttattttattctattttgctaacggtattgaatggcataagtttgaaacgagtgaagaaataatttctacttacttattagacgacgtattatacacgggtgttaatggggcggtatacacattttcaaataataaactaaacaaaactggtttaactaataataattatataacaacatctataaaagtagaggatgcggataaggatacattagtatgcggaaccaataacggaaatcccaaatgttggaaaatagacggttcagacgacccaaaacatagaggtagaggatacgctccttatcaaaatagcaaagtaacgataatcagtcacaacggatgtgtactatctgacataaacatatcaaaagaaggaattaaacgatggagaagatttgacggaccatgtggttatgatttattcacggcggataacgtaattccaaaagatggtttacgaggagcattcgtcgataaagacggtacttatgacaaagtttacattcttttcactgatactatcggctcaaagagaattgtcaaaattccgtatatagcacaaatgtgcctaaacgacgaaggtggtccatcatcattgtctagtcatagatggtcgacgtttctcaaagtcgaattagaatgtgatatcgacggaagaagttatagacaaattattcattctagaactataaaaacagataatgatacgatactatatgtattcttcgatagtccttattccaagtccgcattatgtacctattctatgaataccattaaacaatctttttctacgtcaaaattggaaggatatacaaagcaattgccgtctccagctcctggtatatgtttaccagctggaaaagttgttccacataccacgtttgaagtcatagaacaatataatgtactagatgatattataaagcctttatctaaccaacctatcttcgaaggaccgtctggtgttaaatggttcgatataaaggagaaggaaaatgaacatcgggaatatagaatatacttcataaaagaaaattctatatattcgttcgatacaaaatctaaacaaactcgtagctcgcaagtcgatgcgcgactattttcagtaatggtaactgcgaaaccgttatttatagcagatatagggataggagtaggaatgccacaaatgaaaaaaatacttaaaatgtaatcttaatcgagtacaccacacgacaatgaacaaacataagacagattatgctggttatgcttgctgcgtaatatgcggtctaattgtcggaattatttttacagcgacactattaaaagttgtagaacgtaaattagttcatacaccattaatagataaaacgataaaagatgcatatattagagaagattgtcctactgactggataagctataataataaatgtatccatttatctactgatcgaaaaacctgggaggaaggacgtaatgcatgcaaagctctaaattcaaattcggatctaattaagatagagactccaaacgagttaagttttttaagaagccttagacgaggctattgggtaggagaatccgaaatattaaaccagacaaccccatataattttatagctaagaatgccacgaagaatggaactaaaaaacggaaatatatttgtagcacaacgaatactcccaaactgcattcgtgttacactatataacaattacactacatttttatcataccactacttcggttagatgttttagaaaaaaataaatatcgccgtaccgttcttgtttttataaaaataacaattaacaattatcaaattttttctttaatattttacgtggttgaccattcttggtggtaaaataatctcttagtgttggaatggaatgctgtttaatgtttccacactcatcgtatattttgacgtatgtagtcacatcgtttacgcaatagtcagactgtagttctatcatgcttcctacatcagaaggaggaacagttttaaagtctcttggttttaatctattaccgttagttttcatgaaatcctttgttttatccacttcacattttaaataaatgtccactatacattcttttgttaattttactagatcgtcatgggtcatagaatttataggttccgtagtccatggatccaaactagcaaacttcgcgtatacggtatcgcgattagtgtatacaccaactgtatgaaaattaagaaaacagtttaataaatcaacagaaatatttaatcctccgtttgatacagatgcgccatatttatggatttcggattcacacgttgtttgtctgaggtgttcgtctagtgttgcttctacgtaaacttcgattcccatatattctttattgtcagaatcgcataccgatttatcatcatacactgtttgaaaactaaatggtatacacatcaaaataataaataataacgagtacattctgcaatattgttatcgtaattggaaaaatagtgttcgagtgagttggattatgtgagtattggattgtatattttattttatattttgtaataagaataaaatgctaatgtcaagtttattccaatagatgtcttattaaaaacatatataataaataacaatggctgaatggcataaaattatcgaggatatctcaaaaaataataagttcgaggatgccgccatcgttgattacaagactacaaagaatgttctagctgctattcctaacagaacatttgccaagattaatccgggtgaaattattcctctcatcactaatcgtaatattctaaaacctcttattggtcagaaatattgtattgtatatactaactctctaatggatgagaacacgtatgctatggagttgcttactgggtacgcccctgtatctccgatcgttatagcgagaactcataccgcacttatatttttgatgggtaagccaacaacatccagacgtgacgtgtatagaacgtgtagagatcacgctacccgtgtacgtgcaactggtaattaaaataaaaagtaatattcatatgtagtgtcaattttaaatgatgatgatgaaatggataatatccatattgacgatgtcaataatgccggtattggcatacagttcatcgatttttagatttcattcagaggatgtggaattatgttatgggcatttgtattttgataggatctataatgtagtaaatataaaatataatccgcatattccatatagatataattttattaatcgcacgttaaccgtagatgaactagacgataatgtcttttttacacatggttattttttaaaacacaaatatggttcacttaatcctagtttgattgtctcattatcaggaaacttaaaatataatgatatacaatgctcagtaaatgtatcgtgtctcattaaaaatttggcaacgagtacatctactatattaacatctaaacataagacttattctctacatcggtccacgtgtattactataataggatacgattctattatatggtataaagatataaatgacaagtataatgacatctatgattttactgcaatatgtatgctaatagcgtctacattgatagtgaccatatacgtgtttaaaaaaataaaaatgaactcttaattatgctatgctattagaaatggataaaatcaaaattacggttgattcaaaaattggtaatgttgttaccatatcgtataacttggaaaagataactattgatgtcacacctaaaaagaaaaaagaaaaggatgtattattagcgcaatcagttgctgtcgaagaggcaaaagatgtcaaggtagaagaaaaaaatattatcgatattgaagatgacgatgatatggatgtagaaagcgcgtaatacgatctataaaaataagtatataaatactttttatttactgtactcttactgtgtagtggtgataccctactcgattatttttttaaaaaaaaaatacttattctgattcttctagccatttccgtgttcgtttgaatgccacatcgacgtcaaagataggggagtagttgaaatctagttctgcattgttggtacgcacctcaaatgtagtgttggatatcttcaacgtatagttgttgagtagtgatggttttctaaatagaattctcttcatatcattcttgcacgcgtacatttttagcatccatcttggaatcctagatccttgttctattcccaatggtttcatcaatagaagattaaacatatcgtacgaacacgatggagagtaatcgtagcaaaagtaagcatttcctttaatcttagatcccggatactggatatattttgcagccaacacgtgcatccatgcagcatttcctacatatacccggctatgcaccgcgtcatcatcgactgtacgatacataatgttaccgtgttgcttacattgctcgtaaaagactttcatcaatttgtctccttctccgtaaattccagtgggtcttaggcaacaagtatacaattttgctccattcatgattacggaattattggctttcataaccagttgctcggccatacgtttactttttgcgtatacatgtcctggtgatatatcataaagggtatgctcatggccgatgaatggatcaccgtgtttattgggtcctattgcttccatgctactagtatagatcaaatacttgattcctaggtccacacaagctgccaaaatagtctgtgttccataatagtttactttcatgatttcattatcggtgtattttccaaatacatccactagagcagccgtatgaataatcagatttaccccatctagcgcttctctcaccttatcaaagtcgtttatatcacattgtatatagtttataaccttaactttcgaggttattggttgtggatcttctacaatatctatgactctgatttcttgaacatcatctgcactaattaacagttttactatatacctgcctagaaatccggcaccaccagtaaccgcgtacacggccattgctgccactcataatatcagactacttattctattttactaaataatggctgtttgtataatagaccacgataatatcagaggagttatttactttgaaccagtccatggaaaagataaagttttaggatcagttattggattaaaatccggaacgtatagtttgataattcatcgttacggagatattagtcaaggatgtgattccataggcagtccagaaatatttatcggtaacatctttgtaaacagatatggtgtagcatatgtttatttagatacagatgtaaatatatttacaattattggaaaggcgttatctatttcaaaaaatgatcagagattagcgtgtggagttattggtatttcttacataaatgaaaagataatacattttcttacaattaacgagaatggcgtttgatatatcagttaatgcgtctaaaacaataaatgcattagtttacttttctactcagcaaaataaattagtcatacgtaatgaagttaatgatacacactacactgtcgaatttgatagggacaaagtagttgacacgtttatttcatataatagacataatgacaccatagagataagaggggtgcttccagaggaaactaatattggttgcgcggttagtatgacttacttgtataataagtatagttttaaactgattttagcagaatatataagacacagaaatactatatccggcaatatttattcggcattgatgacactagatgatttggctattaaacagtatggagacattgatctattatttaatgagaaacttaaagtagactccgattcgggactatttgactttgtcaactttgtaaaggatatgatatgttgtgattctagaatagtagtagctctatctagtctagtatctaaacattgggaattgacaaataaaaaatataggtgtatggcattagccgaacatatatctgatagtattccaatatctgagctatctagactacgatacaatctatgtaagtatctacgcggacacactgagagcatagaggataaatttgattattttgaagacgatgattcgtctacatgttctgccgtaaccgacagggaaacggatgtataattttttttatagcgtgaaggatatgataaaaaatataattgttgtatttatcccattccaatcaccttatatgattctgtaacacaataaaggagtcttatagatgtatagaggtcagatactggtttgataaactgtttattccacataagtatgtttgactttatggttagacccgcatactttaacaaatcactgaaaattggagttaggtattgacctctcagaatcagttgccgttctggaacattaaatgtattttttatgatatactccaacgcatttatgtgggcatacaacaagtcattactaatggaatattccaagagttttagttgtctagtatttaacaagagaagagatttcaacagactgtttatgaactcgaatgccgcctcattgtcgcttatattgatgatgtcgaattctcccaatatcatcaccgatgagtagctcatcttgttatcgggatccaagttttctaaagatgtcattaaaccctcgatcatgaatggatttatcatcatcgtttttatgttggacatgagcttagtccgtttgtccacatctatagaagatgatttctgaattatttcatatatctctctctttaactccaggaacttgtcaggatggtctactttaatatgttctcgtctaagagatgaaaatctttggatggttgcacgcgacttttctctaaaggatgacgttgcccaagatcctctcttaaatgaatccatcttatccttggacaagatggacagtctattttccttagatggtttaatatttttgttacccatgatctataaaggtagacctaatcgtctcggatgaccatatatttattttcagttttattatacgcataaattgtaaaaaatatgttaggtttacgaaaatgtctcgtggggcattaatcgtttttgaaggattggacaaatctggaaaaacaacacaatgtatgaacatcatggaatcaataccttcaaacacaataaaataccttaactttcctcagagatccactgtcactggaaagatgatagatgactatctaactcgtaaaaaaacctataatgatcatatagttaatctattattttgtgcaaatagatgggagtttgcatcttttatacaagaacaactagaacagggaattactttaatagttgatagatacgcattttctggagtagcgtatgccgccgctaaaggcgcgtcaatgactctcagtaagagttatgaatctggattgcctaaacccgacttagttatattcttggaatctggtagcaaagaaattaatagaaacgtcggtgaggaaatttatgaagatgttacattccaacaaaaggtattacaagaatataaaaaaatgattgaagaaggagatattcattggcaaattatttcttctgaattcgaggaagatgtaaagaaggagttgattaagaatatagttatagaggctatacacacggttactggaccagtggggcaactgtggatgtaatagtgaaattacattttttataaatagatgttagtacagtgttataaatggatgaagcatattactctggcaacttggaatcagtactcggatacgtgtccgatatgcataccgaactcgcatcaatatctcaattagttattgccaagatagaaactatagataatgatatattaaacaaggacattgtaaattttatcatgtgtagatcaaacttggataatccatttatctctttcctagatactgtatatactattatagatcaagagaactatcagactgagttgattaattcattagacgacaatgaaattatcgattgtatagttaataagtttatgagcttttataaggataacctagaaaatatagtagatgctatcattactctaaaatatataatgaataatccagattttaaaactacgtatgccgaagtactcggttccagaatagccgatatagatattaaacaagtgatacgtaagaatatactacaattgtctaataatatccgcgaacgatatttgtgaaaatattaaaaaaaaatactttttttattaaatgacgtcttttcgtgaatttagaaaattatgctgtgctatatatcacgcatcaggatataaagaaaaatctaaattaattagagactttataacagatagggatgataaatatttgatcattaagctattgcttcccggattagacgatagaatttataacatgaacgataaacaaattataaaattatatagtataatatttaaacaatctcaggaagatatgctacaagatttaggatacggatatataggagacactattaggactttcttcaaagagaacacagaaatccgtccacgagataaaagcattttaactttagaagaagtggatagttttttaactacgttatcatccgtaactaaagaatcgcatcaaataaaattattgactgatgtagcatctgtttgtacatgtaatgatttaaaatgtgtagtcatgcttattgataaagatctaaaaattaaagcgggtcctcggtacgtacttaacgctattagtcctaatgcctatgatgtgtttagaaaatctaataacttgaaagagataatagaaaattcatctaaacaaaatctagactctatatctatttctgttatgactccaattaatcccatgttagcggaatcgtgtgattctgtcaataaggcgtttaaaaaatttccatcaggaatgtttgcggaagtcaaatacgatggtgaaagagtacaagttcataaaaataataacgagtttgccttctttagtagaaacatgaaaccagtactctctcataaagtggattatctcaaagaatacataccgaaagcatttaaaaaagctacgtctatcgtattggattctgaaattgttcttgtagacgaacataatgtaccgctcccgtttggaagtttaggtatacacaaaaagaaagaatataaaaactctaacatgtgtttgttcgtgtttgactgtttgtactttgatggattcgatatgacggacattccattgtacgaacgaagatcttttctcaaagatgttatggttgaaatacccaatagaatagtattctcagagttgacgaatattagtaacgagtctcagttaactgacgtattggatgatgcactaacgagaaaattagaaggattggtcttaaaagatattaatggagtatacgaaccgggaaagagaagatggttaaaaataaagcgagactatttgaacgagggttccatggcagattctgccgatttagtagtactaggtgcctactatggtaaaggagcaaagggtggtatcatggcagtctttctaatgggttgttacgacgatgaatccggtaaatggaagacggttaccaagtgttcaggacacgatgataatacgttaagggagttgcaagaccaattaaagatgattaaaattaacaaggatcccaaaaaaattccagagtggttagtagttaataaaatctatattcccgattttgtagtagaggatccgaaacaatctcagatatgggaaatttcaggagcagagtttacatcttccaagtcccataccgcaaatggaatatccattagatttcctagatttactaggataagagaggataaaacgtggaaagaatctactcatctaaacgatttagtaaacttgactaaatcttaatagttacatacaaactgaaaattaaaataacactatttagttggtggtcgccatggatggtgttattgtatactgtctaaacgcgctagtaaaacatggcgaggaaataaatcatataaaaaatgatttcatgattaaaccatgttgtgaaagagtttgtgaaaaagtcaagaacgttcacattggcggacaatctaaaaacaatacagtgattgcagatttgccatatatggataatgcggtatccgatgtatgcaattcactgtataaaaagaatgtatcaagaatatccagatttgctaatttgataaagatagatgacgatgacaagactcctactggtgtatataattattttaaacctaaagatgccattcctgttatcatatctataggaaaggataaagatgtctgtgaactattaatctcatcagacatatcgtgtgcatgcgtggagttaaattcatatcacgtagccattcttcccatggatgtttccttttttaccaaaggaaatgcatcattgattattctcctgtttgatttctctatcgatgcggcacctctcttaagaagtgtaaccgataataatgttattatatctagacaccagcgtctacatgacgagcttccgagttccaattggttcaagttttacataagtataaagtccgactattgttctatattatatatggttgttgatggatctgtgatgcatgcgatagctgataatagaactcacgcaattattagcaaaaatatattagacaatactacgattaacgatgagtgtagatgctgttattttgaaccacagattaggattcttgatagagatgagatgctcaatggatcatcgtgtgatatgaacagacattgtattatgatgaatttacctgatgtaggcgaatttggatctagtatgttggggaaatatgaacctgacatgattaagattgctctttcggtggctggtaatttaataagaaatcgagactacattcccgggagacgaggatatagctactacgtttacggtatagcctctagataatttttttaagcacgaaataaaaaacataattttaaaccaatctatttcatactattttgtgtgatcaccatggacataaagatagatattagtatttctggtgataaatttacggtgactactaggagggaaaatgaagaaagaaaaaaatatctacctctccaaaaagaaaaaactactgatgttatcaaacctgattatcttgagtacgatgacttgttagatagagatgagatgtttactattctagaggaatattttatgtacagaggtctattaggcctcagaataaaatatggacgactctttaacgaaattaaaaaattcgacaatgatgcggaagaacaattcggtactatagaagaactcaagcagaaacttagattaaattctgaagagggagcagataactttatagattatataaaggtacaaaaacaggatatcgtcaaacttactgtatacgattgcatatctatgataggattgtgtgcatgcgtggtagatgtttggagaaatgagaaactgttttctagatggaaatattgtttacgagcgattaaactgtttattgatgatcacatgcttgataagataaaatctatactgcagaatagactagtatatgtggaaatgtcatagaaagttaaaagttaatgagagcaaaaatatataaggttgtattccatatttgttatttttttctgtaatagttagaaaaatacattcgatggtctatctatcagattattatgtgttataaggtactttttctcataataaactagagtatgagtaagatagtgtttttcaaaacatataaatctaaaattgatggatgagatatacagctattaatttcgaaaatatattttaatctgataactttaaacatggatttttaatggtggtttaacgttttaaaaaaagattttgttattgtagtatatgataatattaaaagatggatataaagaatttgctgactgcatgtactattttttacattactacattggctacggcagatatacctacttcgtcactgccacacgctccggtaaacggggcatgtgacgagggagaatatcttgataagaggcataatcaatgttgtaatcagtgtccacctggagaatttgccaaggttagatgtaatggtaacgataacacaaaatgtgaacgctgcccacctcatacatataccgcaatccccaattactctaatggatgtcatcaatgtagaaaatgcccaacaggatcatttgataaggtaaagtgtaccggaacacagaacagtaaatgttcgtgtcttcctggttggtattgcgctactgattcttcacagactgaagattgtcgagattgtataccaaaaaggagatgtccatgcggatactttggtggaatagatgaacaaggaaatcctatttgtaaatcgtgttgtgttggtgaatattgcgactacctacgtaattatagacttgatccatttcctccatgcaaactatctaaatgtaattaattatgattttgatgataatgttaccatacattatatcgctacttggttagtgtattattcagtatgaagacctattaataattacttatcttttgacgatcttgttataattataatataaaaatacttatggcatagtaactcataattgctgacgcgataaattcgtaataatctgttttgttcaaatttttataaggaatctacaggcataaaaataaaaatataatttataatatactcttacagcgcgccatcatgaataacagcagtgaattgattgctgttattaatggatttagaaatagtggacgattttgtgatattaatatagttattaatgatgaaaggataaacgctcacagactcatcctatctggagcctccgaatatttttccattctgttttccaataattttatcgattctaatgaatacgaagttaatctaagtcatttagattatcaaagtgttaacgatttgatcgattacatttatgggatacctttgagcctaactaacgataacgtgaaatatattctttcaaccgctgattttttacaaattggatctgctattacggagtgtgaaaattacatacttaaaaatctttgttctagaaactgtatcgatttctacatatacgctgataaatataataacaagaaaatagaatcagcgtcgtttaacacaatattacaaaatattttgagactcatcaacgatgaaaactttaaatacttaacagaggaatcaatgataaaaattttaagcgatgatatgttaaatataaaaaatgaggatttcgccccactaattctcattaaatggttagagagtactcaacaaccatgcaccgtcgagttacttaaatgcctcagaatatcattgctttccccacaagttataaaatcactttatagtcatcgactggttagttcaatctacgaatgtataacattcttaaacaatatagcattcttggatgaatcatttcctagataccatagcatcgagttgatatctatcggtataagtaattcgcatgataagatttccataaactgctacaatcataaaaaaaatacatgggaaatgatatcttcacgtagatataggtgtagtttcgcagtggccgtcctggataatattatctatatgatgggtggatatgatcagtccccgtatagaagttcaaaggttatagcgtacaatacatgtacaaattcttggatatatgatataccagagctaaaatatcctcgttctaattgtgggggactggctgatgacgaatacatttattgtataggcggcatacgcgatcaggattcatcgttgacatctagtattgatagatggaagccatcaaaaccatattggcagaagtatgctaaaatgcgcgaaccaaaatgtgatatgggggttgcgatgttaaacggattaatatatgttataggtggaatcgttaaaggtgacacgtgtaccgacgcactagagagtttatcagaagatggatggatgaagcatcaacgtcttccaataaaaatgtccaatatgtcgacgattgttcatgatggcaagatttatatatctggaggttacaacaatagtagtgtagttaatgtaatatcgaatctagtccttagctataattcgatatatgatgaatggaccaaattatcatcattaaacattcctagaattaatcccgctctatggtcagcgcataataaattatatgtaggaggaggaatatctgatgatgttcgaactaatacatctgagacatacgacaaagaaaaagattgttggacattggataatggtcacgtgttaccacgcaattatataatgtataaatgcgaaccgattaaacataaatatccattggaaaaaacacagtacacgaatgattttctaaagtatttggaaagttttataggtagttgatagaacaaaatacataattttgtaaaaataaatcactttttatactaatatgacacgattaccaatacttttgttactaatatcattagtatacgctacaccttttcctcagacatctaaaaaaataggtgatgatgcaactctatcatgtaatcgaaataatacaaatgactacgttgttatgagtgcttggtataaggagcccaattccattattcttttagctgctaaaagcgacgtcttgtattttgataattataccaaggataaaatatcttacgactctccatacgatgatctagttacaactatcacaattaaatcattgactgctagagatgccggtacttatgtatgtgcattctttatgacatcaactacaaatgacactgataaagtagattatgaagaatactccacagagttgattgtaaatacagatagtgaatcgactatagacataatactatctggatctacacattcaccggaaactagttctaagaaacctgattatatagataattctaattgctcgtcggtattcgaaatcggtacccggggatcagcttgcatgcctgcagcaattcccgaggctgtagccgacgatggtgcgccaggagagttgttgattcattgtttgcctccctgctgcggtttttcaccgaagttcatgccagtccagcgtttttgcagcagaaaagccgccgacttcggtttgcggtcgcgagtgaagatccctttcttgttaccgccaacgcgcaatatgccttgcgaggtcgcaaaatcggcgaaattccatacctgttcaccgacgacggcgctgacgcgatcaaagacgcggtgatacatatccagccatgcacactgatactcttcactccacatgtcggtgtacattgagtgcagcccggctaacgtatccacgccgtattcggtgatgataatcggctgatgcagtttctcctgccaggccagaagttctttttccagtaccttctctgccgtttccaaatcgccgctttggacataccatccgtaataacggttcaggcacagcacatcaaagagatcgctgatggtatcggtgtgagcgtcgcagaacattacattgacgcaggtgatcggacgcgtcgggtcgagtttacgcgttgcttccgccagtggcgcgaaatattcccgtgcaccttgcggacgggtatccggttcgttggcaatactccacatcaccacgcttgggtggtttttgtcacgcgctatcagctctttaatcgcctgtaagtgcgcttgctgagtttccccgttgactgcctcttcgctgtacagttctttcggcttgttgcccgcttcgaaaccaatgcctaaagagaggttaaagccgacagcagcagtttcatcaatcaccacgatgccatgttcatctgcccagtcgagcatctcttcagcgtaagggtaatgcgaggtacggtaggagttggccccaatccagtccattaatgcgtggtcgtgcaccatcagcacgttatcgaatcctttgccacgcaagtccgcatcttcatgacgaccaaagccagtaaagtagaacggtttgtggttaatcaggaactgttcgcccttcactgccactgaccggatgccgacgcgaagcgggtagatatcacactctgtctggcttttggctgtgacgcacagttcatagagataaccttcacccggttgccagaggtgcggattcaccacttgcaaagtcccgctagtgccttgtccagttgcaaccacctgttgatccgcatcacgcagttcaacgctgacatcaccattggccaccacctgccagtcaacagacgcgtggttacagtcttgcgcgacatgcgtcaccacggtgatatcgtccacccaggtgttcggcgtggtgtagagcattacgctgcgatggattccggcatagttaaagaaatcatggaagtaagactgctttttcttgccgttttcgtcggtaatcaccattcccggcgggatagtctgccagttcagttcgttgttcacacaaacggtgatacgtacacttttcccggcaataacatacggcgtgacatcggcttcaaatggcgtatagccgccctgatgctccatcacttcctgattattgacccacactttgccgtaatgagtgaccgcatcgaaacgcagcacgatacgctggcctgcccaacctttcggtataaagacttcgcgctgataccagacgttgcccgcataattacgaatatctgcatcggcgaactgatcgttaaaactgcctggcacagcaattgcccggctttcttgtaacgcgctttcccaccaacgctgatcaattccacagttttcgcgatccagactgaatgcccacaggccgtcgagttttttgatttcacgggttggggtttctacaggacgtaacattctagtcgaggaattcatttatagcatagaaaaaaacaaaatgaaattctactatatttttacatacatatattctaaatatgaaagtggtgattgtgactagcgtagcatcgcttctagacatctatatactatatagtaataccaatactcaagactacgaaactgatacaatctcttatcatgtgggtaatgttctcgatgtcgatagccatatgcccggtagttgcgatatacataaactgatcactaattccaaacccacccgctttttatagtaagtttttcacccataaataataaatacaataattaatttctcgtaaaagtagaaaatatattctaatttattgcacggtaaggaagtagaatcataaagaacagtgacggatccccgatccccgacctgcaggcatgcaagctcgactccggaaccaattactgataatgtagaagatcatacagacaccgtcacatacactagtgatagcattaatacagtaagtgcatcatctggagaatccacaacagacgagactccggaaccaattactgataaagaagatcatacagttacagacactgtctcatacactacagtaagtacatcatctggaattgtcactactaaatcaaccaccgatgatgcggatctttatgatacgtacaatgataatgatacagtaccaccaactactgtaggcggtagtacaacctctattagcaattataaaaccaaggactttgtagaaatatttggtattaccgcattaattatattgtcggccgtggcaattttctgtattacatattatatatataataaacgttcacgtaaatacaaaacagagaacaaagtctagatttttgacttacataaatgtctgggatagtaaaatctatcatattgagcggaccatctggtttaggaaagacagccatagccaaaagactatgggaatatatttggatttgtggtgtcccataccactagatttcctcgtcctatggaacgagaaggtgttgattaccattacgttaacagagaggccatctggaagggaatagccgccggaaactttctagaacatactgagtttttaggaaatatttacggaacttctaaaacagctgtgaatacagcggctattaataatcgtatttgtgtgatggatctaaacatcgacggtgttagaagtcttaaaaatacgtacctaatgccttactcggtgtatataagacctacctctcttaaaatggttgagaccaagcttcgtcgtagaaacactgaagctaacgatgagattcatcgtcgtgtgatgttggcaaaaactgacatggatgaggcaggtgaagccggtctattcgacactattatcattgaagatgatgtgaatttagcatatagtaagttaattcagatactacaggaccgtattagaatgtattttaacactaattagagacttaagacttaaaacttgataattaataatataactcgtttttatatgtgtctatttcaacgtctaatgtattagttaaatattaaaacttaccacgtaaaacttaaaatttaaaatgatatttcattgacagatagatcacacattatgaactttcaaggacttgtgttaactgacaattgcaaaaatcaatgggtcgttggaccattaataggaaaaggtggattcggtagtatttatactactaatgacaataattatgtagtaaaaatagagcccaaagctaacggatcattatttaccgaacaggcattttatactagagtacttaaaccatccgttatcgaagaatggaaaaaatctcacaatataaagcacgtaggtcttatcacgtgcaaggcatttggtctatacaaatccattaatgtggaatatcgattcttggtaattaatagattaggtgcagatctagatgcggtgatcagagccaataataatagactaccaaaaaggtcggtgatgttgatcggaatcgaaatcttaaataccatacaatttatgcacgagcaaggatattctcacggagatattaaagcgagtaatatagtcttagatcaaatagataagaataaattatatctagtggattacggattggtttctaaattcatgtctaatggcgaacatgttccatttataagaaatccaaataaaatggataacggtactctagaatttacacctatagattcgcataaaggatacgttgtatctagacgtggagatctagaaacacttggatattgtatgattagatggttgggaggtatcttaccatggactaagatatctgaaacaaagaattgtgcattagtaagtgccacaaaacagaaatatgttaacaatactgcgactttgttaatgaccagtttgcaatatgcacctagagaattgctgcaatatattaccatggtaaactctttgacatattttgaggaacccaattacgacaagtttcggcacatattaatgcagggtgtatattattaagtgtggtgtttggtcgataaaaattaaaaaataacttaatttattattgatctcgtgtgtacaaccgaaatcatggcgatgttttacgcacacgctctcggtgggtacgacgagaatcttcatgcctttcctggaatatcatcgactgttgccaatgatgtcaggaaatattctgttgtgtcagtttataataacaagtatgacattgtaaaagacaaatatatgtggtgttacagtcaggtgaacaagagatatattggagcactgctgcctatgtttgagtgcaatgaatatctacaaattggaaatccgatccatgatcaagaaggaaatcaaatctctatcatcacatatcgccacaaaaactactatgctctaagcggaatcgggtacgagagtctagacttgtgtttggaaggagtagggattcatcatcacgtacttgaaacaggaaacgctgtatatggaaaagttcaacatgattattctactatcaaagagaaggccaaagaaatgagtgcacttagtccaggacctatcatcgattaccacgtctggataggagattgtatctgtcaagttactgctgtggacgtacatggaaaggaaattatgaaaatgagattcaaaaagggtgcggtgcttccgatcccaaatctggtaaaagttaaacttggggagaatgatacagaaaatctttcttctactatatcggcggcaccatcgaggtaaccacctctctggaagacagcgtgaatcatgtactcatgaaacgtttggaaactatacgccatatgtggtctgttgtatatgatcattttgatattgtgaatggtaaagaatgctgttatgtgcatacgcattcatctaatcaaaatcctataccgagtactgtaaaaacaaatttgtacatgaagactatgggatcatgcattcaaatggattccatggaagctctagagtatcttagcgaactgaaggaatcaggtggatggagtcccagaccagaaatgcaggaatttgaatatccagatggagtggaagacactgaatcaattgagagattggcagaggagttcttcaatagatcagaacttcaggctggtgaatcagtcaaatttggtaattctattaattgttaaacatacatctgtttcagctaagcaactaagaacacgtatacggcagcagcttccttctatactctcatcttttaccaacacaaagggtggatatttgttcattggagttgataataatacacacaaagtatttggattcacggtgggttacgactacctcagactgatagagaatgatatagaaaagcatatcaaaagacttcgtgttgtgcatttctgtgagaagaaagaggacatcaagtacgcgtgtcgattcatcaaggtatataaacctggggatgagactacctcgacatacgtgtgcgctatcaaagtggaaagatgctgttgtgctgtgtttgcagattggccagaatcatggtatatggatactaatggtatcaagaagtattctccagatgaatgggtgtcacatataaaattttaattaatgtaactatagagaacaaataataaggttgtaatatcatatagacaataactaacaattaattagtaactgttatctcttttttaactaaccaactaactatatacctattaatacatcgtaattatagttcttaacatctattaatcattaattcgcttctttaattttttataaactaacattgttaattgaaaagggataacatgttacagaatataaattatatatggatttttttaaaaaggaaatacttgactggagtatatatttatctcttcattatatagcacgcgtgttttccaatttttccacatcccatataatacaggattataatctcgttcgaacatacgagaaagtggataaaacaatagttgattttttatctaggttgccaaatttattccatattttagaatatggggaaaatattctacatatttattctatggatgatgctaatacgaatattataattttttttctagatagagtattaaatattaataagaacgggtcatttatacacaatctcgggttatcatcatccattaatataaaagaatatgtatatcaattagttaataatgatcatccagataataggataagactaatgcttgaaaatggacgtagaacaagacattttttgtcctatatatcagatacagttaatatctatatatgtattttaataaatcatggattttatatagatgccgaagacagttacggttgtacattattacatagatgtatatatcactataagaaatcagaatcagaatcatacaatgaattaattaagatattgttaaataatggatcagatgtagataaaaaagatacgtacggaaacacaccttttatcctattatgtaaacacgatatcaacaacgtggaattgtttgagatatgtttagagaatgctaatatagactctgtagactttaatagatatacacctcttcattatgtctcatgtcgtaataaatatgattttgtaaagttattaatttctaaaggagcaaatgttaatgcgcgtaataaattcggaactactccattttattgtggaattatacacggtatctcgcttataaaactatatttggaatcagacacagagttagaaatagataatgaacatatagttcgtcatttaataatttttgatgctgttgaatctttagattatctattatccagaggagttattgatattaactatcgtactatatacaacgaaacatctatttacgacgctgtcagttataatgcgtataatacgttggtctatctattaaacaaaaatggtgattttgagacgattactactagtggatgtacatgtatttcggaagcagtcgcaaacaacaacaaaataataatggaagtactattgtctaaacgaccatctttgaaaattatgatacagtctatgatagcaattactaaacataaacagcataatgcagatttattgaaaatgtgtataaaatatactgcgtgtatgaccgattatgatactcttatagatgtacagtcgctacagcaatataaatggtatattttaagatgtttcgatgaaatagatatcatgaagagatgttatataaaaaataaaactgtattccaattagttttttgtatcaaagacattaatactttaatgagatacggtaaacatccttctttcgtgaaatgcactagtctcgacgtatacggaagtcgtgtacgtaatatcatagcatctattagatatcgtcagagattaattagtctattatccaagaagctggatcctggagataaatggtcgtgttttcctaacgaaataaaatataaaatattggaaaactttaacgataacgaactatccacatatctaaaaatcttataaacattattaaaatataaaatctaagtaggataaaatcacactacatcattgtttccttttagtgctcgacagtgtatactatttttaacgctcataaataaaaatgaaaacgatttccgttgttacgttgttatgcgtactacctgctgttgtttattcaacatgtactgtacccactatgaataacgctaaattaacgtctaccgaaacatcgtttaatgataaccagaaagttacgtttacatgtgatcagggatatcattctttggatccaaatgctgtctgtgaaacagataaatggaaatacgaaaatccatgcaaaaaaatgtgcacagtttctgattatgtctctgaactatataataaaccgctatacgaagtgaattccaccatgacactaagttgcaacggcgaaacaaaatattttcgttgcgaagaaaaaaatggaaatacttcttggaatgatactgttacgtgtcctaatgcggaatgtcaacctcttcaattagaacacggatcgtgtcaaccagttaaagaaaaatactcatttggggaatatatgactatcaactgtgatgttggatatgaggttattggtgcttcgtacataagttgtacagctaattcttggaatgttattccatcatgtcaacaaaaatgtgatatgccgtctctatctaacggattaatttccggatctacattttctatcggtggcgttatacatcttagttgtaaaagtggttttacactaacggggtctccatcatccacatgtatcgacggtaaatggaatcccatactcccaatatgtgtacgaactaacgaaaaatttgatccagtggatgatggtcccgacgatgagacagatttgagcaaactctcgaaagacgttgtacaatatgaacaagaaatagaatcgttagaagcaacttatcatataatcatagtggcgttgacaattatgggcgtcatatttttaatctccgttatagtattagtttgttcctgtgacaaaaataatgaccaatataagttccataaattgctaccgtaaatataaatccgttaaaataattaataatttaataacaaacaagtatcaaaagattaaagacttatagctagaatcaattgagatgtcttcttcagtggatgttgatatctacgatgccgttagagcatttttactcaggcactattataacaagagatttattgtgtatggaagaagtaacgccatattacataatatatacaggctatttacaagatgcgccgttataccgttcgatgatatagtacgtactatgccaaatgaatcacgtgttaaacaatgggtgatggatacacttaatggtataatgatgaatgaacgcgatgtttctgtaagcgttggcaccggaatactattcatggaaatgtttttcgattacaataaaaatagtatcaacaatcaactaatgtatgatataattaatagcgtatctataattctagctaatgagagatatagaagcgcttttaacgacgatggtatatacatccgtagaaatatgattaacaagttgtacggatacgcatctctaactactattggcacgatcgctggaggtgtttgttattatctgttgatgcatctagttagtttgtataaataattatttcaatatactagttaaaattttaagattttaaatgtataaaaaactaataacgtttttatttgtaataggtgcattagcatcctattcgaataatgagtacactccgtttaataaactgagtgtaaaactctatatagatggagtagataatatagaaaattcatatactgatgataataatgaattggtgttaaattttaaagagtacacaatttctattattacagagtcatgcgacgtcggatttgattccatagatatagatgttataaacgactataaaattattgatatgtataccattgactcgtctactattcaacgcagaggtcacacgtgtagaatatctaccaaattatcatgccattatgataagtacccttatattcacaaatatgatggtgatgagcgacaatattctattactgcagagggaaaatgctataaaggaataaaatatgaaataagtatgatcaacgatgatactctattgagaaaacatactcttaaaattggatctacttatatatttgatcgtcatggacatagtaatacatattattcaaaatatgatttttaaaaatttaaaatatattatcacttcagtgacagtagtcaaataacaaacaacaccatgagatatattataattctcgcagttttgttcattaatagtatacatgctaaaataactagttataagtttgaatccgtcaattttgattccaaaattgaatggactggggatggtctatacaatatatcccttaaaaattatggcatcaagacgtggcaaacaatgtatacaaatgtaccagaaggaacatacgacatatccgcatttccaaagaatgatttcgtatctttctgggttaaatttgaacaaggcgattataaagtggaagagtattgtacgggactatgcgtcgaagtaaaaattggaccaccgactgtaacattgactgaatacgacgaccatatcaatttgtacatcgagcatccgtatgctactagaggtagcaaaaagattcctatttacaaacgcggtgacatgtgtgatatctacttgttgtatacggctaacttcacattcggagattctaaagaaccagtaccatatgatatcgatgactacgattgcacgtctacaggttgcagcatagactttgtcacaacagaaaaagtgtgcgtgacagcacagggagccacagaagggtttctcgaaaaaattactccatggagttcgaaagtatgtctgacacctaaaaagagtgtatatacatgcgcaattagatccaaagaagatgttcccaatttcaaggacaaaatggccagagttatcaagagaaaatttaatacacagtctcaatcttatttaactaaatttctcggtagcacatcaaatgatgttaccacttttcttagcatgcttaacttgactaaatattcataactaatttttattaatgatacaaaaacgaaataaaactgcatattatacactggttaacgcccttataggctctaaccattttcaagatgaggtccctgattatagtccttctgttcccctctatcatctactccatgtctattagacgatgtgagaagactgaagaggaaacatggggattgaaaatagggttgtgtataattgccaaagatttctatcccgaaagaactgattgcagtgttcatctcccaactgcaagtgaaggattgataactgaaggcaatggattcagggatatacgaaacaccgataaattataaaaaaagcaatgtgtccgctgtttccgttaataatactattttcgtaactggcggattattcataaataactctaatagcacgatcgtggttaacaatatggaaaaacttgacatttataaagacaaacaatggtcgattatagaaatgcctatggctagggtatatcacggcattgactcgacatttggaatgttatattttgccggaggtctatccgttaccgaacaatatggtaatttagagaaaaacaacgagatatcttgttacaatcctagaacgaataagtggtttgatatttcatatactatttataagatatccatatcatcattgtgtaaactaaataacgtcttctatgtatttagtaaggacattggatatgtggaaaagtatgatggtgcatggaagttagtacatgatcgtctccccgctataaaggcattatcaacttctccttattgattgaaaatgaaaatataaatagtttttatgtatagcagtattaccctatagttttattgcttactactaacatggatacagatgttacaaatgtagaagatatcataaatgaaatagatagagagaaagaagaaatactaaaaaatgtagaaattgaaaataataaaaacattaacaagaatcatcccaatgaatatattagagaagcactcgttattaataccagtagtaatagtgattccattgataaagaagttatagaatgtatcagtcacgatgtaggaatatagatcatatctactaatttttataatcgatacaaaacataaaaaacaactcgttattacatagcaggcatggaatccttcaagtattgttttgataacgatggcaagaaatggattatcggaaatactttatattctggtaattcaatactctataaggtcagaaaaaatttcactagttcgttctacaattacgtaatgaagatagatcacaaatcacacaagccattgttgtctgaaatacgattctatatatctgtattggatcctttgactatcgacaactggacacgggaacgtggtataaagtatttggctattccagatctgtatggaattggagaaaccgatgattatatgttcttcgttataaagaattcgggaagagtattcgccccaaaggatactgaatcagtcttcgaagcatgcgtcactatgataaacacgttagagtttatacactctcgaggatttacccatggaaaaatagaaccgaggaatatactgattagaaataaacgtctttcactaattgactattctagaactaacaaactatacaagagtggaaactcacatatagattacaacgaggacatgataacttcaggaaatatcaattatatgtgtgtagacaatcatcttggagcaacagtttcaagacgaggagatttagaaatgttgggatattgcatgatagaatggttcggtggcaaacttccatggaaaaacgaaagtagtataaaagtaataaaacaaaaaaaagaatataaaaaatttatagctactttctttgaggactgttttcctgaaggaaatgaacctctggaattagttagatatatagaattagtatacacgttagattattctcaaactcctaattatgacagactacgtaaactgtttatacaagattgaaattatattcttttttttatagagtgtggtagtgttacggatatctaatattaatattagactatctctatcgcgctacacgaccaatatcgattactatggatatcttctatgaaaggagagaatgtatttatttctccagcgtcaatctcgtcagtattgacaatactgtattatggagctaatggatccactgctgaacagctatcaaaatatgtagaaacggaggagaacacggataaggttagcgctcagaatatctcattcaaatccatgaataaagtatatgggcgatattctgccgtgtttaaagattcctttttgagaaaaattggcgataagtttcaaactgttgacttcactgattgtcgcactatagatgcaatcaacaagtgtgtagatatctttactgaggggaaaatcaatccactattggatgaaccattgtctcctagcaattagtgccgtatactttaaagcaaaatggttgacgccattcgaaaaggaatttaccagtgattatcccttttacgtatctccgacggaaatggtagacgtaagtatgatgtctatgtacggcaaggcatttaatcacgcatctgtaaaagaatcattcggcaacttttcaatcatagaactgccatatgttggagatactagtatgatggtcattcttccagacaagattgatggattagaatccatagaacaaaatctaacagatacaaattttaagaaatggtgtgactttatggatgctatgtttatagatgttcacattcccaagtttaaggtaacaggctcgtataatctggtggatactctagtaaagtcaggactgacagaggtgttcggttcaactggagattatagcaatatgtgtaatttagatgtgagtgtcgacgctatgatccacaaaacgtatatagatgtcaatgaagagtatacagaagcagctgcagcaacttctgtactagtggcagactgtgcatcaacaattacaaatgagttctgtgcagatcatccgttcatctatgtgattaggcatgttgatggaaaaattcttttcgttggtagatattgctctccgacaactaattgttaaccattttttttaaaaaaaatagaaaaaacatgtggtattagtgcaggtcgttgttcttccaattgcaattggtaagatgacggccaactttagtacccacgtcttttcaccacagcactgtggatgtgacagactgaccagtattgatgacgtcaaacaatgtttgactgaatatatttattggtcgtcctatgcataccgcaacaggcaatgcgctggacaattgtattccacactcctctcttttagagatgatgcggaattagtgttcatcgacattcgcgagctggtaaaaaatatgccgtgggatgatgtcaaagattgtacagaaatcatccgttgttatataccggatgagcaaaaaaccatcagagagatttcggccatcatcggactttgtgcatatgctgctacttactggggaggtgaagaccatcccactagtaacagtctgaacgcattgtttgtgatgcttgagatgctaaattacgtggattataacatcatattccggcgtatgaattgatgagttgtacatcttgacattttctttcttctcttctccctttcttctcttctcccttcctccctcttctccctttcccagaaacaaacttttttacccactataaaataaaatgagtatactacctattatatttcttcctatatttttttattcttcattcgttcagacttttaacgcgtctgaatgtatcgacaaagggcaatattttgcatcattcatggagttagaaaacgagccagtaatcttaccatgtcctcaaataaatacgctatcatccggatataatatattagatattttatgggaaaaacgaggagcggataatgatagaattataccgatagataatggtagcaatatgctaattctgaacccgacacaatcagactctggtatttatatatgcattaccacgaacgaaacctactgtgacatgatgtcgttaaatttgacaatcgtgtctgtctcagaatcaaatatagatcttatctcgtatccacaaatagtaaatgagagatctactggcgaaatggtatgtcccaatattaatgcatttattgctagtaacgtaaacgcagatattatatggagcggacatcgacgccttagaaataagagacttaaacaacggacacctggaattattaccatagaagatgttagaaaaaatgatgctggttattatacatgtgttttagaatatatatacggtggcaaaacatataacgtaaccagaattgtaaaattagaggtacgggatagaataataccttctactatgcaattaccagatggcattgtaacttcaataggtagtaatttgactattgcatgcagagtatcgttgagacctcccacaacggacaccgacgtcttttggataagtaatggtatgtattacgaagaagatgatggggacggaaacggtagaataagtgtagcaaataaaatctatatgaccgataagagacgtgttattacatcccggttaaacattaatcctgtcaaggaagaagatgctacaacgtttacgtgtatggcgtttactattcctagcatcagcaaaacagttactgttagtataacgtgaatgtatgttgttacatttccatgtcaattgagtttataagaatttttatacattatcttccaacaaacaattgacgaacgtattgctatgattaactcccacgatactatgcatattattaatcattaacttgcagactatacctagtgctattttgacatactcgtgttcttgtgtaattgcggtatctatattattaaagtacgtaaatctagctatagttttattatttaattttagataatataccgtctccttatttttaaaaattgccacatcctttattaaatcatgaatgggaatttctatgtcatcgttagtatattgtgaacaacaagagcagatatctataggaaagggtggaatgcgatacattgatctatgtagttttaaaacacacgcgaactttgaagaatttatataaatcattccatcgatacatccttctatgttgacatgtatatatccaggaattcttttattaatgtcaggaaatgtataaactaaaacattgcccgaaagcggtgcctctatctgcgttatatccgttcttaacttacaaaatgtaaccaatacctttgcatgacttgttttgttcggcaacgttagtttaaacttgacgaatggattaattacaatagcatgatccgcgcatctattaagtttttttactttaacgcccttgtatgtttttacagagactttatctaaatttctagtgcttgtatgtgttataaatataacgggatatagaaccgaatcacctaccttagatacccaattacattttatcagatccagataataaacaaattttgtcgccctaactaattctatattgttatatattttacaattggttatgatatcatgtaataacttggagtctaacgcgcatcgtcgtacgtttatacaattgtgatttagtgtagtatatctacacatgtatttttccgcactatagtattctggactagtgataaaactatcgttatatctgtcttcaatgaactcatcgagatattgctctctgtcatattcatacacctgcataaactttctagacatcttacaatccgtgttattttaggatcatatttacatatttacgggtatatcaaagatgttagattagttaatgggaatcgtctataataatgaatattaaacaattatatgaggacttttaccacaaagcatcataaaaatgagtcgtcgtctgatttatgttttaaatatcaaccgcaaatcaactcataaaatacaagagaatgaaatatatacatattttagtcattgcaatatagaccatacttctacagaacttgattttgtagttaaaaactatgatctaaacagacgacaacctgtaactgggtatactgcactacactgctatttgtataataattactttacaaacgatgtactgaagatattattaaatcatgacgtaaatgtaacgatgaaaaccagtagcggacgtatgcctgtttatatattgcttactagatgttgtaatatttcacatgatgtagtgatagatatgatagacaaagataaaaaccacttattacatagagactattccaacctattactagagtatataaaatctcgttacatgttattgaaggaagaggatatcgatgagaacatagtatccactttattagataagggaatcgatcctaactttaaacaagacggatatacagcgttacattattattatttgtgtctcgcacacgtttataaactaggtgagtgtagaaaaccgataacgataaaaaaggccaagcgaattatttctttgtttatacaacatggagctaatctaaacgcgttagataattgtggtaatacaccattccatttgtatcttagtattgaaatgtgtaataatattcatatgactaaaatgctgttgacttttaatccgaatttcaaaatatgtaataatcatggattaacgcctatactatgttatataacttccgactacatacaacacgatattcttgttatgttaatacatcactatgaaacaaatgttggagaaatgccgatagatgagcgtcgtatgatcgtattcgagtttatcaaaacatattctacacgtccggcagattcgataacttatttgatgaataggtttaaaaatataaatatttatacccgctatgaaggaaagacattattacacgtagcatgtgaatataataatacacaagtaatagattatcttatacgtatcaacggagatataaatgcgttaaccgacaataacaaacacgctacacaactcattatagataacaaagaaaattccccatataccattaattgtttactgtatatacttagatatattgtagataagaatgtgataagatcgttggtggatcaacttccatctctacctatcttcgatataaaatcatttgagaaattcatatcctactgtatacttttagatgacacattttacgataggcacgttaagaatcgcgattctaaaacgtatcgatacgcattttcaaaatacatgtcgtttgataaatacgatggtataataactaaatgtcacgacgaaacaatgttactcaaactgtccactgttctagacactacactatatgcagttttaagatgtcataattcgagaaagttaagaagatacctcaacgagttaaaaaaatataataacgataagtcctttaaaatatattctaatattatgaatgagagataccttaatgtatattataaagatatgtacgtgtcaaaggtatatgataaactatttcctgttttcacagataaaaattgtctactaacattactaccttcagaaattatatacgaaatattatacatgctgacaattaacgatctttataatatatcgtatccacctaccaaagtatagttgtatttttctcatgcgatgtgtgtaaaaaaactgatattatataaatattttagtgccgtataataaagatgacgatgaaaatgatggtacatatatatttcgtatcattattgttattgctattccacagttacgccatagacatcgaaaatgaaatcacagaattcttcaataaaatgagagatactctaccagctaaagactctaaatggttgaatccagcatgtatgttcggaggcacaatgaatgatatagccgctctaggagagccattcagcgcaaagtgtcctcctattgaagacagtcttttatcgcacagatataaagactatgtggttaaatgggagaggctagaaaagaatagacggcgacaggtttctaataaacgtgttaaacatggtgatttatggatagccaactatacatctaaattcagtaaccgtaggtatttgtgcaccgtaactacaaagaatggtgactgtgttcagggtatagttagatctcatattaaaaaacctccttcatgcattccaaaaacatatgaactaggtactcatgataagtatggcatagacttatactgtggaattctttacgcaaaacattataataatataacttggtataaagataataaggaaattaatatcgacgacattaagtattcacaaacgggaaaggaattaattattcataatccagagttagaagatagcggaagatacgactgttacgttcattacgacgacgttagaatcaagaatgatatcgtagtatcaagatgtaaaatacttacggttataccgtcacaagaccacaggtttaaactaatactagatccgaaaatcaacgtaacgataggagaacctgccaatataacatgcactgctgtgtcaacgtcattattgatcgacgatgtactgattgaatgggaaaatccatccggatggcttataggattcgattttgatgtatactctgttttaactagtagaggcggtatcaccgaggcgaccttgtactttgaaaatgttactgaagaatatataggtaatacatataaatgtcgtggacacaactattattttgaaaaaacccttacaactacagtagtattggagtaaatatacaatgcatttttatatacattactgaattattattactgaattattattactgaattattattaattatatcgtatttgtgctatagaatggatgaagatacgcgactatctaggtatttgtatctcaccgatagagaacatataaatgtagactctattaaacagttgtgtaaaatatcagatcctaatgcatgttatagatgtggatgtacggctttacatgagtacttttataattatagatcagtcaacggaaaatacaagtatagatacaacggttactatcaatattattcatctagcgattatgaaaattataatgaatattattatgatagaactggtatgaacagtgagagtgataatatatcaatcaaaacagaatatgaattctatgatgaaacacaagatcaaagtacacaactagtaggttacgacattaaactcaaaaccaatgaggatgattttatggctatgatagatcagtgggtgtccatgattatatagatgaatcaattaataaagtagtatatggaagagagtctcacgtaagatggcgggatatatggcaagaacataatgatggcgtatacagtataggaaaggagtgcatagataatatatacgaagacaaccataccgtagacgaattctacaagatagacagcgtatcagatgtagatgacgcggaacacatatctccgataactaaaaaaccatagaatcagttgatgataatacctacatttctaatcttccgtataccatcaaatacaaaatattcgagcaacaataagtattttttatacctttaaaactgataaataaattttttctagtgatattttggcaagatgagaatcctatttctcatcgctttcatgtatgggtgtgttcactcatatgttaacgcggttgaaaccaaatgtccaaatctagacattgtaacatcttctggagaatttcattgttcaggatgtgtggaacatatgcctgagtttagctatatgtattggttggcaaaggatatgaaatcggacgaggataccaagtttatagaacatctgggtgatggcatcaaagaagatgaaaccgttcgtaccacagatagtggaatcgtcactctacgtaaagtccttcatgtgactgatactaataaatttgataattataggttcacttgtgtcctcgctacgctagatggcatttataaaaagaatgtttgctgaagtagttgtgtgctactatttttatttatgatataatctaatggaattaatttgaattgatatttatccaatactaaagattatattagaatcaaattaatcttttatacgagaaaaaataacgacatacgtcgtcaacaaattaaactttttatttattagttaactagcttatagaacttgctcattgttatgtttctaaaacgggtacggcatataggacaattatccgacgcaccggtttctcttcgtgttctatgccatatattgatgcatgttatgcaaaatatatgagtacacgaatccaataaaccaaagtatctatcgttttgagtaaacaacttcatagcaaattccacattctttttctttacttactctatacacgtcctcgtatttatttagtattttgatgatatccaactcagaaatggttgttgtattattgggtgtatttggagtataggtattattagctatgtaccaatttaccaaccctcttaatattgattgataatcacatcggttatccaattaataactaaattgtagtgtatatatagaccatatatgtttctatttttttgacagttacgtatagtttcagtaagttttgattgttgtattcctgtatctctagataagttagtcatatagtcccttccggcgatacgttttttccaagcccgaaattgattagccaaatgtgtatttatttttgtgatattgatataatatttcggataatgcatactgttagtcttatatcatttggttcatctatgtattgtaatattgttacatgatctatagatgatgtattgattttggcaggatcgaattccatatccgcgactaaacagtgaaaaaaatgtaaatactttttaaattttaaattagtaaaacttttttttattttttatgattccaaaaatactgaatacaaagtcctaaattataaatatggagatcatactaccacaacttattattatgtatacaaggccggtgtaatagatagatatatataattctattacaccggcagacaattaccgaccggtatttgtcgttaccaacataccgtataatatgtaatatacaattccataacccattgacagttgttatacatcaaaattgcaattcttttgattacgatgttataagaatgtagttaattgatgtatgatgttaatgtgtcctctttcctcttataacatcgtaatcaaaaacttttttataatatatacctaataatgtgtcttaatagttctcgtgattcgtcaaacaatcattcttataaaatataataaagcaacgtaaaaacacataaaaataagcgtaactaataagacaatggatatttacgacgataaaggtctacagactattaaactgtttaataatgaatttgattgtataaggaatgacatcagagaattatttaaacatgtaactgattccgatagtatacaacttccgatggaagacaattctgatattatagaaaatatcagaaaaatactatatagacgattaaaaaatgtagaatgtgttgacatcgataacacaataacttttatgaaatacgatccaaatgatgataataagcgtacgtgttctaattgggtacccttaactaataactatatggaatattgtctagtaatatatttggaaacaccgatatgtggaggcaaaataaaattataccaccctacaggaaatataaagtcggataaggatattatgtttgcaaagactctagactttaaatcaacgaaagtgttaactggacgtaaaacaattgccgttctagacatatccgtttcatataatagatcaatgactactattcactacaacgacgacgttgatatagatatacatactgataaaaatggaaaagagttatgttattgttatataacaatagatgatcattacttggttgatgtggaaactataggagttatagtcaatagatctggaaaatgtctgttagtaaataaccatctaggtataggtatcgttaaagataaacgtataagcgatagttttggagatgtatgtatggatacaatatttgacttttctgaagcacgagagttattttcattaactaatgatgataacaggaatatagcatgggacactgataaactagacgatgatacagatatatggactcccgtcacagaagatgattacaaatttctttctagactagtattgtatgcaaaatctcaatcggatactgtatttgactattatgttcttactggtgatacggaaccacccactgtattcattttcaaggtaactagattttactttaatatgccgaaataaaaaatttttgtataatatctagaggtagaggtattgtttagataaatacaaataacatagatacatcgcatacttagcatttttataaatatacataagacatacactttatacatttttgtaaaaatactcataaaaaaatttataaaaattatggcacaaccatatcttgtataggtagtttagttcgtcgagtgaacctataaacagataatagacaacacataataatgcctactaatacaagcataataccgggagatgggatatatgacgttgtagtgtttgggttttctgaacgttgatagtctactaatactacatgctgacatctaatgcctgtataaccatgagagcatctacaatacataccgtcaatatctctagcgtggatacagtcaccgtgtaaacaatatccatctccctctggaccgcataatctgatagctggaatatctgttgtagcgtttgtaatttctggcaatgtcgtttcgatagcgttaccactatcggcgaatgatctgattatcatagcagcgaacaacaacatcagataatttatcaacatttttgatggattctgtgtttatgctgtttctcagtgtgtgtttatgacaagattgggaattttatattattaattcagtaatataaactaataatatattgttaattgtgtaaataatataaaaataacaatacaatattgaatgtgttgctgttaaaaatgtatgtgttaatataatagaataaaataaatgagtatgatcattttagataacgattgattttatcattaccgcttcattcttatattctttgcttacggaacctatatttagaaacatctactaacaattttttatgcttgcattattaatggtatgtaatatgattgattgtgtacgcaataccaatttgttaagtatgaatacggggtacaaacataaattgaaatttaacattatttatttatgatatatatcgttatcgttaggtctataccatggatatctttaaagaactaatcttaaaacaccctgatgaaaatgttttgatttctccagtttccattttatctactttatctattctaaatcatggagcagctggttctacagctgaacaactatcaaaatatatagagaatatgaatgagaatacacccgatgacaataatgatgacatggaggtagatattccgtattgtgcgacactagctaccgcaaataaaatatacggtagcgatagtatcgagttccacgcctccttcctacaaaaaataaaagacgattttcaaactgtaaactttaataatgctaaccaaacaaaggaactaatcaacgaatgggttaagacaatgacaaatggtaaaattaattccttattgactagtccgctatccattaatactcgtatgacagttgttagcgccgtccattttaaagcaatgtggaaatatccattttctaaacatcttacatatacagacaagttttatatttctaagaatatagttaccagcgttgatatgatggtgggtaccgagaataacttgcaatatgtacatattaatgaattattcggaggattctctattatcgatattccatacgagggaaactctagtatggtaattatactaccggacgacatagaaggtatatataacatagaaaaaaatataacagatgaaaaatttaaaaaatggtgtggtatgttatctactaaaagtatagacttgtatatgccaaagtttaaagtggaaatgacagaaccgtataatctggtaccgattttagaaaatttaggacttactaatatattcggatattatgcagattttagcaagatgtgtaatgaaactatcactgtagaaaaatttctacatacgacgtttatagatgttaatgaggagtatacagaagcatcggccgttacaggagtatttacgattaacttttcgatggtatatcgtacgaaggtctacataaaccatccattcatgtacatgattaaagacaccacaggacgtatactttttatagggaaatactgctatccgcaataaatataaacaaatagacttttataaagagtcttcaacgataagtatatcgacatactacttatgctgcgaaagattctgaacgagaacgactatctcaccctcttggatcatatccgcactgctaaatactaaatctccactacactttttatcatcttatgaggaatgattgccttcgtgaaataggaataattagcaccagaatagctatggattattgtggtagagagtgcactattctatgtcgtctactggatgaagatgtgacgtacaaaaaaataaaactagaaattgaaacgtgtcacaacttatcaaaacatatagatagacgaggaaacaatgcgctacattgttacgtctccaataaatgcgatacagacattaagattgttctctcgcggagtcgagagactttgtagaaacaacgaaggattaactccgctaggagtatacagtaagcatagatacgtaaaatctcagattgtgcatctactgatatccagctattcaaattcctctaacgaactcaagtcgaatataaatgatttcgatctgtattcggataatatcgacttacgtctgctaaaatacctaattgtggataaacggatacgtccgtccaagaatacgaattatgcaatcaatggtctcggattggtggatatatacgtaacgacgcctaatccgagaccagaagtattgctatggcttcttaaatcagaatgttacagcaccggttacgtatttcgtacctgtatgtacgacagtgatatgtgtaagaactctcttcattactatatatcgtctcatagagaatctcaatctctatccaaggatgtaattaaatgtttgatcgataacaatgtttccatccatggcagagacgaaggaggatctttacccatccaatactactggtctttctcaaccatagatatagagattgttaaattattattaataaaggatgtggacacgtgtagagtatacgacgtcagccctatattagaggcgtattatctaaacaagcgatttagagtaaccccatataatgtagacatggaaatcgttaatcttcttattgagagacgtcatactcttgtcgacgtaatgcgtagtattacttcgtacgattccagagaatataaccactacatcatcgataacattctaaagagatttagacaacaggatgaatccatcgtacaagccatactgataaactacttacattacggcgatatggtcgttcgatgcatgttagataacggacaacaactatcctctacacgactactttgttaataataatctcgtcgatgtaaacgtcgtaaggtttatcgtggaaaatatggacacgcggctgtaaatcacgtatcgaacaatggccgtctatgtatgtacggtctgatattatcgagatttaataattgcgggtatcactgttatgaaaccatactgatagatgtatttgatatactaagcaagtacatggatgatatagatatgatcgataactctactatattacgcggtcgatgtcaataatatacaatttgcaaagcggttattggaatatggagcgagtatcacgctcgataatcaatacggccatccagaaaagcagttacagaagagaaaacaaaacgaaatcgttgttctacaagatgtctctccctacgacgattactacgtaaaaaagatactagcctactgcctattaagggacgagtcattcgcggaactacatagtaaattctgtttaaacgaggactataaaagtgtatttatgaaaaatatatcattcgataagatagattccatcatcgtgacataagtcgcctcaaagagattcgaatctccgacaccgacctgtatacggtatcacagctatcttaaagccatacattcagacagtcacatttcatttcccatgtacgacgatctcatagaacagtgccatctatcgatggagcgtaaaagtaaactcgtcgacaaagcactcaataaattagagtctaccatcggtcaatctagactatcgtatttgcctccggaaattatgcgcaatatcatctaaacagtatgttgtacggaaagaaccattacaaatattatccatgatagaaagaaaatatctatatgattggagaagtaggaaacaggaacaagacaacgattactacattattaaatcatgaagtccgtattatactcgtatatattgtttctctcatgtataataataaacggaagagatatagcaccgcatgcaccatccgatggaaagtgtaaagacaacgaatacaaacgccataatttgtgtccgggaacatacgcttccagattatgcgatagcaagactaacacacgatgtacgccgtgtggttcgggtaccttcacatctcgcaataatcatttacccgcttgtctaagttgtaacggaagacgcgatcgtgtaacacgactcacaatagaatctgtgaatgctctcccggatattattgtcttctcaaaggatcatccggatgcaaggcatgtgtttcccaaacaaaatgtggaataggatacggagtatccggagacgtcatctgttctccgtgtggtctcggaacatattctcacaccgtctcttccgcagataaatgcgaacccgtacccagaaatacgtttaactatatcgatgtggaaattaacctgtatccagttaacgacacgtcgtgtactcggacgaccactaccggtctcagcgaatccatctcaacgtcggaactaactattactatgaatcataaagactgtaatcccgtatttcgtgatggatacttctccgttcttaataaggtagcgacttcaggtttctttacaggagaaaggtgtgcactctgaatttcgagattaaatgcaataacaaagattcttcctccaaacagttaacgaaagcaaagaatgatactatcatgccgcattcggagacagtaactctagtgggcgacatctatatactatatagtaataccaatactcaagactacgaaactgatacaatctcttatcatgtgggtaatgttctcgatgtcgatagccatatgcccggtagttgcgatatacataaactgatcactaattccaaacccacccactttttatagtaagtttttcacccataaataataaatacaataattaatttctcgtaaaagtagaaaatatattctaatttattgcacggtaaggaagtagaatcataaagaacagtactcaatcaatagcaattatgaaacaatatatcgtcctggcatgcatgtgcctggcggcagctgctatgcctgccagtcttcagcaatcatcctcatcctcctcctcgtgtacggaagaagaaaacaaacatcatatgggaatcgatgttattatcaaagtcacaaagcaagaccaaacaccgaccaatgataagatttgccaatccgtaacggaaattacagagtccgagtcagatccagatcccgaggtggaatcagaagatgattccacatcagtcgaggatgtagatcctcctaccacttattactccatcatcggtggaggtctgagaatgaactttggattcaccaaatgtcctcagattaaatccatctcagaatccgctgatggaaacacagtgaatgctagattgtccagcgtgtccccaggacaaggtaaggactctcccgcgatcactcatgaagaagctcttgctatgatcaaagactgtgaagtgtctatcgacatcagatgtagcgaagaagagaaagacagcgacatcaagacccatccagtactcgggtctaacatctctcataagaaagtgagttacgaagatatcatcggttcaacgatcgtcgatacaaaatgcgtcaagaatctagagtttagcgttcgtatcggagacatgtgcaaggaatcatctgaacttgaggtcaaggatggattcaagtatgtcgacggatcggcatctgaaggtgcaaccgatgatacttcactcatcgattcaacaaaactcaaagcgtgtgtctgaatcgataactctattcatctgaaattggatgagtagggttaatcgaacgattcaggcacaccacgaattaaaaaagtgtaccggacactatattccggtttgcaaaacaaaaatgttcttaactacattcacaaaaagttacctctcgcgacttcttctttttctgtctcaatagtgtgatacgattatgacactattcctattcctattcctatttcctttcagagtatcacaaaaatattaaacctctttctgatggtctcataaaaaaagttttacaaaaatatttttattctctttctctctttgatggtctcataaaaaaagttttacaaaaatatttttattctctttctctctttgatggtctcataaaaaaagttttacaaaaatatttttattctctttctctctttgatggtctcataaaaaaagttttacaaaaatatttttattctctttctctctttgatggtctcataaaaaaagttttacaaaaatatttttattctctttctctctttgatggtctcataaaaaaagttttacaaaaatatttttattctctttctctctttgatggtctcataaaaaaagttttacaaaaatatttttattctctttctctctttgatggtctcataaaaaaagttttacaaaaatatttttattctctttctctctttgatggtctcataaaaaaagttttacaaaaatatttttattctctttctctctttgatggtctcataaaaaaagttttacaaaaatatttttattctctttctctctttgatggtctcataaaaaaagttttacaaaaatatttttattctctttctctctttgatggtctcataaaaaaagttttacaaaaatatttttattctctttctctctttgatggtctcataaaaaagttttacaaaaatatttttattctctttctctctttgatggtctcataaaaaagttttacaaaaatatttttattctctttctctctttgatggtctcataaaaaaagttttacaaaaatatttttattctctttctctctttgatggtctcataa

SEQ ID NO: 2 - DNA, 186854 bp, Vaccinia virus
  LIVP complete genome
ttccactatctgtggtacgaacggtttcatcttctttgatgccatcacccagatgttctataaacttggtatcctcgtccgatttcatatcctttgccaaccaatacatatagctaaactcaggcatatgttccacacatcctgaacaatgaaattctccagaagatgttacaatgtctagatttggacatttggtttcaaccgcgttaacatatgagtgaacacacccatacatgaaagcgatgagaaataggattctcatcttgccaaaatatcactagaaaaaatttatttatcaattttaaaggtataaaaaatacttattgttgctcgaatattttgtatttgatggtatacggaagattagaaatgtaggtattatcatcaactgattctatggttttatgtattctatcatgtttcactattgcgttggaaataatatcatatgcttccacatatattttattttgttttaactcataatactcacgtaattctggattattggcatatctatgaataattttagctccatgatcagtaaatattaatgagaacatagtattaccacctaccattatttttttcatctcattcaattcttaattgcaaagatctatataatcattatagcgttgacttatggactctggaatcttagacgatgtacagtcatctataatcatggcatatttaatacattgttttatagcatagtcgttatctacgatgttagatatttctctcaatgaatcaatcacacaatctaatgtaggtttatgacataatagcattttcagcagttcaatgtttttagattcgttgatggcaatggctatacatgtatatccgttatttgatctaatgttgacatctgaaccggattctagcagtaaagatactagagattgtttattatatctaacagccttgtgaagaagtgtttctcctcgtttgtcaatcatgttaatgtctttaagataaggtaggcaaatgtttatagtactaagaattgggcaagcataagacatgtcacaaagacccttttttgtatgtataagtgtaaaaattataacatccatagttggatttacataggtgtccaatcgggatctctccatcatcgagataattgatggcatctcccttccttttttagtagatatttcatcgtgtaagaatcaatattaatatttctaaagtatccgtgtatagcctctttatttaccacagctccatattccactagagggatatcgccgaatgtcatatactcaattagtatatgttggaggacatccgagttcattgttttcaatatcaaagagatggtttccttatcatttctccatagtggtacaatactacacattattccgtgcggctttccattttccaaaaacaatttgaccaaatctaaatctacatctttattgtatctataatcactatttagataatcagccataattcctcgagtgcaacatgttagatcgtctatatatgaataagcagtgttatctattcctttcattaacaatttaacgatgtctatatctatatgagatgacttaatataatattgaagagctgtacaatagtttttatctataaaagacggcttgattccgtgattaattagacatttaacaacttccggacgcacatatgctctcgtatccgactctgaatacagatgagagatgatatacagatgcaatacggtaccgcaatttcgtagttgataatcatcatacgcgtatcagtactcgtcctcataaagaacactgcagccattttctatgaacaaatcaataattttagaaacaggatcattgtcattacataattttctataactgaacgatggttttcacatttaacactcaagtcaaatccatgttctaccaacacctttatcaagtcaacgtctacatttttggatttcatatagctgaatatattaaagttatttatgttgctaaatccagtggcttctagtagagccatcgctatatccttattaactttaacatgtctactatttgtgtattcttctaatggggtaagctgtctccaatttttgcgtaatggattagtgccactgtctagtagtagtttgacgacctcgacattattacaatgctcattaaaaaggtatgcgtgtaaagcattattcttgaattggttcctggtatcattaggatctctgtctttcaacatctgtttaagttcatcaagagccacctcctcattttccaaatagtcaaacattttgactgaatgagctactgtgaactctatacacccacacaactaatgtcattaaatatcatgtcaaaaacttgtacaattattaataaaaataatttagtgtttaaattttaccagttccagattttacacctccgttaatacctccattaaccccactggacgatcctcctccccacattccaccgccaccagatgtataagttttagatcctttattactaccatcatgtccatggataaagacactccacatgccgccactaccccctttagaagacatattaataagacttaaggacaagtttaacaataaaattaatcacgagtaccctactaccaacctacactattatatgattatagtttctatttttacagtaccttgactaaagtttctagtcacaagagcaatactaccaacctacactattatatgattatagtttctatttttataggaacgcgtacgagaaaatcaaatgtctaatttctaacggtagtgttgataaacgattgttatccgcggatacctcctctatcatgtcgtctattttcttactttgttctattaacttattagcattatatattatttgattataaaacttatattgcttattagcccaatctgtaaatatcggattattaacatatcgtttctttgtaggtttatttaacatgtacatcactgtaagcatgtccttaccatttattttaatttgacgcatatccgcaatttctttttcgcagtcggttataaattctatatatgatggatacatgctacatgtgtacttataatcgactaatatgaagtacttgatacatattttcagtaacgatttattattaccacctatgaataagtacctgtgatcgtctaggtaatcaactgttttcttaatacattcgatggttggtaatttactcagaataatttccaatatcttaatatataattctgctatttctgggatatatttatctgccagtataacacaaatagtaatacatgtaaacccatattttgttattatattaatgtctgcgccattatctattaaccattctactaggctgacactatgcgactcaatacaatgataaagtatactacatccatgtttatctattttgtttatatcatcaatatacggcttacaaagttttagtatcgataacacatccaactcacgcatagagaaggtagggaataatggcataatatttattaggttatcatcattgtcattatctacaactaagtttccattttttaaaatatactcgacaactttaggatctctattgccaaatttttgaaaatatttatttatatgcttaaatctatataatgtagctccttcatcaatcatacatttaataacattgatgtatactgtatgataagatacatattctaacaatagatcttgtatagaatctgtatatcttttaagaattgtggatattaggatattattacataaactattacacaattctaaaatataaaacgtatcacggtcgaataatagttgatcaactatataattatcgattttgtgatttttcttcctaaactgtttacgtaaatagttagatagaatattcattagttcatgaccactatagttactatcgaataacgcgtcaaatatttcccgtttaatatcgcatttgtcaagataataatagagtgtggtatgttcacgataagtataataacgcatctctttttcgtgtgaaattaaatagtttattacgtccaaagatgtagcataaccatcttgtgacctagtaataatataataatagagaactgttttacccattctatcatcataatcagtggtgtagtcgtaatcgtaatcgtctaattcatcatcccaattataatattcaccagcacgtctaatctgttctattttgatcttgtatccatactgtatgttgctacatgtaggtattcctttatccaataatagtttaaacacatctacattgggatttgatgttgtagcgtatttttctacaatattaataccatttttgatactatttatttctatacctttcgaaattagtaatttcaataagtctatattgatgttatcagaacatagatattcgaatatatcaaaatcattgatatttttatagtcgactgacgacaataacaaaatcacaacatcgtttttgatattattatttttcttggtaacgtatgcctttaatggagtttcaccatcatactcatataatggatttgcaccactttctatcaatgattgtgcactgctggcatcgatgttaaatgttttacaactatcatagagtatcttatcgttaaccatgattggttgttgatgctatcgcattttttggtttctttcatttcagttatgtatggatttagcacgtttgggaagcatgagctcatatgatttcagtactgtagtgtcagtactattagtttcaataagatcaatctctagatctatagaatcaaaacacgataggtcagaagataatgaatatctgtaggcttcttgttgtactgtaacttctggttttgttagatggttgcatcgtgctttaacgtcaatggtacaaattttatcctcgctttgtgtatcatattcgtccctactataaaattgtatattcagattatcatgcgatgtgtatacgctaacggtatcaataaacggagcacaccatttagtcataaccgtaatccaaaaatttttaaagtatatcttaacgaaagaagttgtgtcattgtctacggtgtatggtactagatcctcataagtgtatatatctagagtaatgtttaatttattaaatggttgataatatggatcctcgtgacaatttccgaagatggaaataagacataaacacgcaataaatctaattgcggacatggttactccttaaaaaaatacgaataatcaccttggctatttagtaagtgtcatttaacactatactcatattaatccatggactcataatctctatacgggattaacggatgttctatatacggggatgagtagttctcttctttaactttatactttttactaatcatatttagactgatgtatgggtaatagtgtttgaagagctcgttctcatcatcagaataaatcaatatctctgtttttttgttatacagatgtattacagcctcatatattacgtaatagaacgtgtcatctaccttattaactttcaccgcatagttgtttgcaaatacggttaatcctttgacctcgtcgatttccgaccaatctgggcgtataatgaatctaaactttaattgcttgtaatcattcgaaataatttttagtttgcatccgtagttatcccctttatgtaactgtaaatttctcaacgcgatatctccattaataatgatgtcgaattcgtgctgtatacccatactgaatggatgaacgaataccgacggcgttaatagtaatttactttttcatctttacatattgggtactagttttactatcataagtttataaattccacaagctactatggaataagccaaccatcttagtataccacacatgtcttaaagtttattaattaattacatgttgttttatatatatcgctacgaatttaaagagaaattagtttaggaagaaaaattatctatctacatcatcacgtctctgtattctacgatagagtgctactttaagatgcgacagatccgtgtcatcaaatatatactccattaaaatgattattccggcagcgaacttgatattggatatatcacaacctttgttaatatctacgacaatagacagcagtcccatggttccataaacagtgagtttatctttctttgaagagatattttgtagagatcttataaaactgtcgaatgacatcgcatttatatctttagctaaatcgtatatgttaccatcgtaatatctaaccgcgtctatcttaaacgtttccatcgctttaaagacgtttccgatagatggtctcatttcatcagtcatactgagccaacaaatataatcgtgtataacatctttgatagaatcagactctaaagaaaacgaatcggctttattatacgcattcatgataaacttaatgaaaaatgtttttcgttgtttaagttggatgaatagtatgtcttaataattgttattatttcattaattaatatttagtaacgagtacactctataaaaacgagaatgacataactaatcataactagttatcaaagtgtctaggacgcgtaattttcatatggtatagatcctgtaagcattgtctgtattctggagctattttctctatcgcattagtgagttcagaatatgttataaatttaaatcgaataacgaacataactttagtaaagtcgtctatattaactcttttattttctagccatcgtaataccatgtttaagatagtatattctctagttactacgatctcatcgttgtctagaatatcacatactgaatctacatccaattttagaaattggtctgtgttacatatctcttctatattattgttgatgtattgtcgtagaaaactattacgtagaccattttctttataaaacgaatatatagtactccaattatctttaccgatatatttgcacacataatccattctctcaatcactacatctttaagattttcgttgttaagatatttggctaaactatataattctattagatcatcaacagaatcagtatatatttttctagatccaaagacgaactctttggcgtcctctataatattcccagaaaagatattttcgtgttttagtttatcgagatctgatctgttcatatacgccatgattgtacggtacgttatgataaccgcataaaataaaaatccattttcatttttaaccaatactattcataattgagattgatgtaatactttgttactttgaacgtaaagacagtacacggatccgtatctccaacaagcacgtagtaatcaaatttggtgttgttaaacttcgcaatattcatcaatttagatagaaacttatactcatcatctgttttaggaatccatgtattattaccactttccaacttatcattatcccaggctatgtttcgtccatcatcgttgcgcagagtgaataattcttttgtattcggtagttcaaatatatgatccatgcatagatcggcaaagctattgtagatgtgatttttcctaaatctaatataaaactcgtttactagcaaacactttcctgatttatcgaccaagacacatatggtttctaaatctatcaagtggtggggatccatagttatgacgcagtaacatatattattacattcttgactgtcgctaatatctaaatatttattgttatcgtattggattctgcatatagatggcttgtatgtcaaagatatagaacacataaccaatttatagtcgcgctttacattctcgaatctaaagttaagagatttagaaaacattatatcctcggatgatgttatcactgtttctggagtaggatatattaaagtctttacagatttcgtccgattcaaataaatcactaaataatatcccacattatcatctgttagagtagtatcattaaatctattatattttatgaaagatatatcactgctcacctctatatttcgtacatttttaaactgtttgtataatatctctctgatacaatcagatatatctattgtgtcggtagacgataccgttacatttgaattaatggtgttccattttacaacttttaacaagttgaccaattcatttctaatagtatcaaactctccatgattaaatattttaatagtatccattttatatcactacggacacaaagtagctgacataaaccattgtataatttttatgttttatgtttattagcgtacacattttggaagttccggcttccatgtatttcctggagagcaagtagatgatgaggaaccagatagtttatatccgtacttgcacttaaagtctacattgtcgttgtatgagtatgatcttttaaacccgctagacaagtatccgtttgatattgtaggatgtggacatttaacaatctgacacgtgggtggatcggaccattctcctcctgaacacaggacactagagttaccaatcaacgaatatccactattgcaactataagttacaacgctcccatcggtataaaaatcctcgtatccgttatgtcttccgttggatatagatggaggggattggcatttaacagattcacaaataggtgcctcgggattccataccatagatccagtagatcctaattcacaatacgatttagattcaccgatcaactgatatccgctattacaagagtacgttatactagagccaaagtctactccaccaatatcaagttggccattatcgatatctcgaggcgatgggcatctccgtttaatacattgattaaagagtgtccatccagtacctgtacatttagcatatataggtcccattttttgctttctgtatccaggtagacatagatattctatagtgtctcctatgttgtaattagcattagcatcagtctccacactattcttaaatttcatattaatgggtcgtgacggaatagtacagcatgatagaacgcatcctattcccaacaatgtcaggaacgtcacgctctccaccttcatatttatttatccgtaaaaatgttatcctggacatcgtacaaataataaaaagcccatatatgttcgctattgtagaaattgtttttcacagttgctcaaaaacgatggcagtgacttatgagttacgttacactttggagtctcatctttagtaaacatatcataatattcgatattacgagttgacatatcgaacaaattccaagtatttgattttggataatattcgtattttgcatctgctataattaagatataatcaccgcaagaacacacgaacatctttcctacatggttaaagtacatgtacaattctatccatttgtcttccttaactatatatttgtatagataattacgagtctcgtgagtaattccagtaattacatagatgtcgccgtcgtactctacagcataaactatactatgatgtctaggcatgggagacttttttatccaacgatttttagtgaaacattccacatcgtttaatactacatatttctcatacgtggtataaactccacccattacatatatatcatcgtttacgaataccgacgcgcctgaatatctaggagtaattaagtttggaagtcttatccatttcgaagtgccgtgtttcaaatattctgccacacccgttgaaatagaaaattctaatcctcctattacatataactttccatcgttaacacaagtactaacttctgattttaacgacgacatattagtaaccgttttccattttttcgttttaagatctacccgcgatacggaataaacatgtctattgttaatcatgccgccaataatgtatagacaattatgtaaaacatttgcattatagaattgtctatctgtattaccgactatcgtccaatattctgttctaggagagtaatgggttattgtggatatataatcagagtttttaatgactactatattatgttttataccatttcgtgtcactggctttgtagatttggatatagttaatcccaacaatgatatagcattgcgcatagtattagtcataaacttgggatgtaaaatgttgatgatatctacatcgtttggatttttatgtatccactttaataatatcatagctgtaacatcctcatgatttacgttaacgtcttcgtgggataagatagttgtcagttcatcctttgataattttccaaattctggatcggatgtcaccgcagtaatattgttgattatttctgacatcgacgcattatatagttttttaattccatatcttttagaaaagttaaacatccttatacaatttgtgaaattaatattatgaatcatagtttttacacatagatctactacaggcggaacatcaattattatggcagcaactagtatcatttctacattgtttatggtgatgtttatcttcttccagcgcatatagtctaatagcgattcaaacgcgtgatagtttataccattcaatataatcgcttcatcctttagatggtgatcctgaatgcgtttaaaaaaattatacggagacgccgtaataatttccttattcacttgtataatttccccattgatagaaaatattacgctttccattcttaaagtactataagtaattatagtataatgtaaacgtttatatattcaatatttttataaaaatcattttgacattaattcctttttaaatttccgtctatcatctatagaaacgtattctatgaatttataaaatgcttttacgtgtcctatcgtaggcgatagaaccgctaaaaagcctatcgaatttctacaaaagaatctgttatatggtatagggagagtataaaacattaaatgtccgtacttattaaagtattcagtagccaatcctaactctttcgaatacttattaatggctcttgttctgtacgaatctatttttttgaacaacggacctagtggtatatcttgttctatgtatctaaaataatgtctgactagatccgttagtttaatatccgcagtcatcttgtctagaatggcaaatctaactgcgggtttaggctttagtttagtttctatatctacatctatgtctttatctaacaccaaaaatataatagctaatattttattacaatcatccggatattcttctacgatctcactaactaatgtttctttggttatactagtatagtcactatcggacaaataaagaaaatcagatgatcgatgaataatacatttaaattcatcatctgtaagatttttgagatgtctcattagaatattattagggttagtactcattatcattcggcagctattacttattttattatttttcaccatatagatcaatcattagatcatcaaaatatgtttcaatcatcctaaagagtatggtaaatgactcttcccatctaatttctgaacgttcaccaatgtctctagccactttggcactaatagcgatcattcgcttagcgtcttctatattattaactggttgattcaatctatctagcaatggaccgtcggacagcgtcattctcatgttcttaatcaatgtacatacatcgccgtcatctaccaattcatccaacaacataagctttttaaaatcatcattataataggtttgatcgttgtcatttctccaaagaatatatctaataagtagagtcctcatgcttagttaacaactattttttatgttaaatcaattagtacaccgctatgtttaatacttattcatattttagtttttaggattgagaatcaatacaaaaattaatgcatcattaattttagaaatacttagtttccacgtagtcaatgaaacatttgaactcatcgtacaggacgttctcgtacaggacgtaactataaaccggtttatatttgttcaagatagatacaaatccgataactttttttacgaattctacgggatccactttaaaagtgtcataccgggttctttttatttttttaaacagatcaatggtgtgatgttgattaggtcttttacgaatttgatatagaatagcgtttacatatcctccataatggtcaatcgccatttgttcgtatgtcataaattctttaattatatgacactgtgtattatttagttcatccttgttcattgttaggaatctatccaaaatggcaattatactagaactataggtgcgttgtatacacatattgatgtgtctgtttatacaatcaatgctactaccttcgggtaaaattgtagcatcatataccatttctagtactttaggttcattattatccattgcagaggacgtcatgatcgaatcataaaaaaatatattatttttatgttattttgttaaaaataatcatcgaatacttcgtaagatactccttcatgaacataatcagttacaaaacgtttatatgaagtaaagtatctacgatttttacaaaagtccggatgcataagtacaaagtacgcgataaacggaataataatagatttatctagtctatctttttctatagctttcatagttagatacatggtctcagaagtaggattatgtaacatcagcttcgataaaatgactgggttatttagtcttacacattcgctcatacatgtatgaccgttaactacagagtctacactaaaatgattgaacaatagatagtctaccattgtttcgtattcagatagtacagcgtagtacatggcatcttcacaaattatatcattgtctaatagatatttgacgcatcttatggatcccacttcaacagccatcttaaaatcggtagaatcatattgctttcctttatcattaataatttctagaacatcatctctatcataaaagatacaaatattaactgtttgatccgtaataacattgctagtcgatagcaatttgttaataagatgcgctgggctcaatgtcttaataagaagtgtaagaggactatctccgaatttgttttgtttattaacatccgttgatggaagtaaaagatctataatgtctacattcttgactgttttagagcatacaatatggagaggtgtatttccatcatgatctggttttgagggactaattcctagtttcatcatccatgagattgtagaagcttttggattgtctgacataagatgtctatgaatatgatttttgccaaatttatccactatcctggcttcgaatccgatggacattatttttttaaacactctttctgaaggatctgtacacgccaacaacggaccacatccttcttcatcaaccgagttgttaatcttggctccatactgtaccaataaatttattctctctatgacttcatcatctgttcccgagagataatatagaggcgttttatgctgtttatcacacgcgtttggatctgcgccgtgcgtcagcagcatcgcgactattctattattattaattttagaagctatatgcaatggataatttccatcatcatccgtctcatttggagagtatcctctatgaagaagttcttcgacaaatcgttcatctagtcctttaattccacaatacgcatgtagaatgtgataattatttccagaaggttcgatagcttgtagcatattcctaaatacatctaaatttttactattatatttggcataaagagatagataatactcggccgacataatgttgtccattgtagtataaaaattaatatttctatttctgtatatttgcaacaatttactctctataacaaatatcataacttagttcttttatgtcaagaaggcactggtttagttcatctataaatgtcacgccataactaccacgcatgccatactcagaattatgataaagatatttatccttggggtgtaggtaatggggattaatctttgttggatcagtctctaagttaacacatgtcacacatgatccatttatagttatatcacacgatgatgatttatgaattgattccggaagatcgctatcgtattttgtggttccacaattcatttccatacatgttattgtcacactaatattatgatgaactttatctagccgctgagtggtaaacaacagaacagatagtttattatctttaccaacaccctcagccgctgccacaaatctctgatccgtatccatgatggtcatgtttatttctagtccgtatccagtcaacactatgttagcatttctgtcgatatagctttcactcatatgacactcaccaataatagtagaattaatgtcgtaatttacaccaatagtgagttcggcggcaaagtaccaataccggtaatcttgtcgaggaggacatatagtattcttgtattctaccgaatacccgagagatgcgatacaaaagagcaagactaatttgtaaaccatcttactcaaaatatgtaacaatagtacgatgcaatgagtaagacaataggaaatctatcttatatacacataattattctatcaattttaccaattagttagtgtaatgttaacaaaaatgtgggagaatctaattagtttttctttacacaattgacgtacatgagtctgagttccttgtttttgctaattatttcatccaatttattattcttgacgatatcgagatcttttgtataggagtcaaacttgtattcaacatgcttttctataatcattttagctatttcggcatcatccaatagtacattttccagattagcagaatagatattaatgtcgtatttgaacagagcctgtaacatctcaatgtctttattatctatagccaatttaatgtccggaatgaagagaagggaattattggtgtttgtcgacgtcatatagtcgagcaagagaatcatcatatccacgtgtccattttttatagtgatgtgaatacaactaaggagaatagccagatcaaaagtagatggtatctctgaaagaaagtaggaaacaatacttacatcattaagcatgacggcatgataaaatgaagttttccatccagttttcccatagaacatcagtctccaatttttcttaacaaacagttttaccgtttgcatgttaccactatcaaccgcataatacaatgcggtgtttcccttgtcatcaaattgtgaatcatccagtccactgaatagcaaaatctttactattttggtatcttccaatgtggctgcctgatgtaatggaaattcattctctagaagatttttcaatgctccagcgttcaacaacgtacatactagacgcacgttattatcagctattgcataatacaaggcactatgtccatggacatccgccttaaatgtatctttactagagagaaagcttttcagctgcttagacttccaagtattaattcgtgacagatccatgtctgaaacgagacgctaattagtgtatattttttcattttttataattttgtcatattgcaccagaattaataatatctttaatagatctgattagtagatacatggctatcgcaaaacaacatatacacatttaataaaaataatatttattaagaaaattcagatttcacgtacccatcaatataaataaaataatgattccttacaccgtacccatattaaggagattccaccttacccataaacaatataaatccagtaatatcatgtctgatgatgaacacaaatggtgtattaaattccagtttttcaggagatgatctcgccgtagctaccataatagtagatgcctctgctacagttccttgttcgtcgacatctatctttgcattctgaaacattttataaatatataatgggtccctagtcatatgtttaaacgacgcattatctggattaaacatactaggagccatcatttcggctatcgacttaatatccctcttattttcgatagaaaatttagggagtttaagattgtacactttattccctaattgagacgaccaatagtctaattttgcagccgtgatagaatctgtgaaatgggtcatattatcacctattgccaggtacatactaatattagcatccttatacggaaggcgtaccatgtcatattctttgtcatcgattgtgattgtatttccttgcaatttagtaactacgttcatcatgggaaccgttttcgtaccgtacttattagtaaaactagcattgcgtgttttagtgatatcaaacggatattgccatatacctttaaaatatatagtattaatgattgcccatagagtattattgtcgagcatattagaatctactacattagacataccggatctacgttctactatagaattaattttattaaccgcatctcgtctaaagtttaatctatataggccgaatctatgatattgttgataatacgacggtttaatgcacacagtattatctacgaaactttgataagttagatcagtgtacgtatatttagatgttttcagcttagctaatcctgatattaattctgtaaatgctggacccagatctctttttctcaaatccatagtcttcaataattctattctagtattacctgatgcaggcaatagcgacataaacatagaaaacgaataaccaaacggtgagaagacaatattatcatcttgaatatttttatacgctactataccggcattggtaaatccttgtagacgataggcggacgctgaacacgctaacgatagtatcaataacgcaatcatgattttatggtattaataattaaccttatttttatgttcggtataaaaaaattattgatgtctacacatccttttgtaattgacatctatatatccttttgtataatcaactctaatcactttaacttttacagttttccctaccagtttatccctatattcaacatatctatccatatgcatcttaacactctctgccaagatagcttcagagtgaggatagtcaaaaagataaatatatagagcataatcattctcgtatactctgccctttattacatcacccgcattgggcaacgaataacaaaatgcaagcatcttgttaacgggctcgtaaattgggataaaaattatgtttttattgtcttatatctattttattcaagagaatattcaggaatttctttttccggttgtatctcgtcgcagtatatatcatttgtacattgtttcatattttttaatagtttacaccttttagtaggactagtatcgtacaattcatagctgtattttgaattccaatcacgcataaaaatatcttccaattgttgacgaagacctaatccatcatccggtgtaatattaatagatgctccacatgtatccgtaaagtaatttcctgtccaatttgaggtacctatataggccgttttatcggttaccatatatttggcatggtttaccctagaatacggaatgggaggatcagcatctggtacaataaatagctttacttctatatttatgtttttagattttagcatagcgatagatcttaaaaagtttctcatgataaacgaagatcgttgccagcaactaatcaatagcttaacggatacttgtctgtctatagcggatcttcttaattcatcttctatataaggccaaaacaaaattttacccgccttcgaataaataatagggataaagttcataacagatacataaacgaatttactcgcatttctaatacatgacaataaagcggttaaatcattggttctttccatagtacatagttgttgcggtgcagaagcaataaatacagagtgtggaacgccgcttacgttaatactaagaggatgatctgtattataatacgacggataaaagtttttccaattatatggtagattgttaactccaagataccagtatacctcaaaaatttgagtgagatccgctgccaagttcctattattgaagatcgcaatacccaattccttgacctgagttagtgatctccaatccatgttagcgcttcctaaataaatatgtgtattatcagatatccaaaattttgtatgaagaactcctcctaggatatttgtaatatctatgtatcgtacttcaactccggccatttgtagtctttcaacatcctttaatggtttgttagatttattaacggctactctaactcgtactcctcttttgggtaattgtacaatctcgtttaatattatcgtgccgaaattcgtacccacttcatccgataaactccaataaaaagatgatatatctagtgtttttgtggtattggatagaatttccctccacatgttaaatgtagacaaatatactttatcaaattgcatacctataggaatagtttctgtaatcactgcgattgtattatccggattcattttatttgttaaaagaataatcctatatcacttcactctattaaaaatccaagtttctatttctttcatgactgattttttaacttcatccgtttccttatgaagatgatgtttggcaccttcataaatttttatttctctattacaatttgcatgttgcatgaaataatatgcacctaaaacatcgctaatcttattgtttgttccctggagtatgagagtcgggggggtgttaatcttggaaattatttttctaaccttgttggtagccttcaagacctgactagcaaatccagccttaattttttcatgattgactaatgggtcgtattggtatttataaactttatccatatctctagatactgattctggacatagctttccgactggcgcatttggtgtgatggttcccataagtttggcagctagcagattcagtcttgaaacagcatctgcattaactagaggagacattagaatcattgctgtaaacaagtttggattatcgtaagaggctagctcccatggaatgacccaataagtagatttaatagttaccacgtgctgtaccaaagtcatcaatcatcattttttcaccattacttcttccatgtccaatatgatcatgtgagaatactaaaattcctaacgatgatatgttttcagctagttcgtcataacgtccagaatgtttaccagctccatgacttatgaatactaatgccttaggatatgtaataggtttccaatatttacaatatatgtaatcattgtccagattgaacatacagtttgcactcatgattcacgttatataactatcaatattaacagttcgtttgatgatcatattatttttatgttttattgataattgtaaaaacatacaattaaatcaatatagaggaaggagacggctactgtcttttgtaagatagtcatggcgactaaattagattatgaggatgctgttttttactttgtggatgatgataaaatatgtagtcgcgactccatcatcgatctaatagatgaatatattacgtggagaaatcatgttatagtgtttaacaaagatattaccagttgtggaagactgtacaaggaattgatgaagttcgatgatgtcgctatacggtactatggtattgataaaattaatgagattgtcgaagctatgagcgaaggagaccactacatcaattttacaaaagtccatgatcaggaaagtttattcgctaccataggaatatgtgctaaaatcactgaacattggggatacaaaaagatttcagaatctagattccaatcattgggaaacattacagatttgatgaccgacgataatataaacatcttgatactttttctagaaaaaaaattgaattgatgatataggggtcttcataacgcataattattacgttagcattctatatccgtgttaaaaaaaattatcctatcatgtatttgagagttttatatgtagcaaacatgatagctgtgatgccaataagctttagatattcacgcgtgctagtgttagggatggtattatctggtggtgaaatgtccgttatataatctacaaaacaatcatcgcatatagtatgcgatagtagagtaaacatttttatagtttttactggattcatacatcgtctacccaattcggttataaatgaaattgtcgccaatcttacacccaaccccttgttatccattagcatagtattaacttcgttatttatgtcataaactgtaaatgattttgtagatgccatatcatacatgatattcatgtccctattataatcattactaactttatcacaatatatgttgataatatctatatatgatctagtctttgtgggcaactgtctatacaagtcgtctaaacgttgtttactcatatagtatcgaacagccatcattacatggtcccgttccgttgatagataatcgagtatgttagtggacttgtcaaatctatataccatattttctggaagtggatatacatagtcgtgatcaacattattgctagcctcatcttctatatcctgtactataccattatctatatcatctacataatctatgatattattacacataaacatcgacaacatactattgtttattatctaagtcctgttgatccaaacccttgatctcctctatttgtactatctagagattgtacttcttccagttctggataatatatacgttgatagattagctgagctattctatctccagtatttacattaaacgtacattttccattattaataagaatgactcctatgtttcccctataatcttcgtctattacaccacctcctatatcaatgccttttagtgacagaccagacctaggagctattctaccatagcagaacttaggcatggacatactaatatctgtcttaattaactgtctttctcctggagggatagtataatcgtaagcgctatacaaatcatatccggcagcacccggcgattgcctagtaggagatttagctctgttagtttccttaacaaatctaactggtgagttaatattcatgttgaacataaaactaatattttatttcaaaattatttaccatcccatatattccatgaataagtgtgatgattgtacacttctatagtatctatatacgatccacgataaaatcctcctatcaatagcagtttattatccactatgatcaattctggattatccctcggataaataggatcatctatcagagtccatgtattgctggattcacaataaaattccgcatttctaccaaccaagaataaccttctaccgaacactaacgcgcatgatttataatgaggataataagtggatggtccaaactgccactgatcatgattgggtagcaaatattctgtagttgtatcagtttcagaatgtcctcccattacgtatataacattgtttatggatgccactgctggattacatctaggtttcagaagactcggcatattaacccaagcagcatccccgtggaaccaacgctcaacagatgtgggatttggtagacctcctactacgtataatttattgttagcgggtatcccgctagcatacagtctggggctattcatcggaggaattggaatccaattgtttgatatataatttaccgctatagcattgttatgtatttcattgttcatccatccaccgatgagatatactacttctccaacatgagtacttgtacacatatggaatatatctataatttgatccatgttcataggatactctatgaatggatacttgtatgatttgcgtggttgtttatcacaatgaaatattttggtacagtctagtatccattttacattatttatacctctgggagaaagataatttgacctgattacatttttgataaggagtagcagatttcctaatttatttcttcgctttatataccacttaatgacaaaatcaactacataatcctcatctggaacatttagttcatcgctttctagaataagtttcatagatagataatcaaaattgtctatgatgtcatcttccagttccaaaaagtgtttggcaataaagtttttagtatgacataagagattggatagtccgtattctatacccatcatgtaacactcgacacaatattcctttctaaaatctcgtaagataaagtttatacaagtgtagatgataaattctacagaggttaatatagaagcacgtaataaattgacgacgttatgactatctatatatacctttccagtatacgagtaaataactatagaagttaaactgtgaatgtcaaggtctagacaaaccctcgtaactggatctttatttttcgtgtatttttgacgtaaatgtgtgcgaaagtaaggagataactttttcaatatcgtagaattgactattatattgcctcctatggcatcaataattgttttgaatttcttagtcatagacaatgctaatatattcttacagtacacagtattgacaaatatcggcatttatgtttctttaaaagtcaacatctagagaaaaatgattatctttttgagacataactcccattttttggtattcacccacacgtttttcgaaaaaattagtttttccttccaatgatatattttccatgaaatcaaacggattggtaacattataaatttttttaaatcccaattcagaaatcaatctatccgcgacgaattctatatatgttttcatcatttcacaattcattcctataagtttaactggaagagccgcagtaagaaattcttgttcaatggatactgcatctgttataatagatctaacggtttcttcactcggtggatgcaataaatgtttaaacatcaaacatgcgaaatcgcagtgcagaccctcgtctctactaattagttcgttggaaaacgtgagtccgggcattaggccacgctttttaagccaaaatatggaagcgaatgatccggaaaagaagattccttctactgcagcaaaggcaataagtctctctccataaccggcgctgtcatgtatccacttttgagcccaatcggccttcttttttacacaaggcatcgtttctatggcattaaagagatagtttttttcattactatctttaacataagtatcgatcaaaagactatacatttccgaatgaatgttttcaatggccatctgaaatccgtagaaacatctagcctcggtaatctgtacttctgtacaaaatcgttccgccaaattttcattcactattccgtcactggctgcaaaaaacgccaatacatgttttataaaatatttttcgtctggtgttagtttattccaatcattgatatctttagatatatctacttcttccactgtccaaaatgatgcctctgcctttttatacatgttccagatgtcatgatattggattgggaaaataacaaatctatttggatttggtgcaaggatgggttccataactaaattaacaataacaataaattttttttcagttatctatatgcctgtacttggattttttgtacatcgatatcgccgcaatcactacaataattacaagtattattgatagcattgttattagtactatcataattaaattatctacattcatgggtgctgaataatcgttattatcatcattatcattttgtaattgtgacatcatactagataaatcgtttgcgagattgttgtgggaagcgggcatggaggatgcattatcattattatttaacgccttccatttggattcacaaatgttacgcacattcaacattttatggaaactataattttgtgaaaacaaataacaagaaaactcgtcatcgttcaaatttttaacgatagtaaaccgattaaacgtcgagctaatttctaacgctagcgactctgttggatatgggtttccagatatatatcttttcagttcccctacgtatctataatcatctgtaggaaatggaagatatttccatttatctactgttcctaatatcatatgtggtggtgtagtagaaccattaagcgcgaaagatgttatttcgcatcgtattttaacttcgcaataatttctggttagataacgcactctaccagtcaagtcaatgatattagcctttacagatatattcatagtagtcgtaacgatgactccatcttttagatgcgatactcctttgtatgtaccagaatcttcgtacctcaaactcgatatatttaaacaagttaatgagatattaacgcgttttatgaatgatgatatataaccagaagttttatcctcggtggctagcgctataaccttatcattataataccaactagtgtgattaatatgtgacacgtcagtgtgggtacaaatatgtacattatcgtctacgtcgtattcgatacatccgcatacagccaacaaatataaaatgacaaatactctaacgccgttcgtacccatcttgatgcggtttaataaatgttttgatttcaatttattgtaaaaaaagattcggttttatactgttcgatattctcattgcttatattttcatctatcatctccacacagtcaaatccgtggttagcatgcacctcatcaaccggtaaaagactatcggactcttctatcattataactctagaatatttaatttggtcattattaatcaagtcaattatcttatttttaacaaacgtgagtattttactcattttttataaaaacttttagaaatatacagactctatcgtgtgtctatatcttctttttatatccaatgtatttatgtctgatttttcttcatttatcatatataatggtccaaattctacacgtgcttcggattcatccagatcattaaggttcttataattgtaacatccttctcttccctcttctacatcttccttcttattcttattcttagcgtcacagaatctaccacagcaggatcccatgacgagcgtcatattaaactaatccattttcaattataatatatgattagtaatgaccattaaaataaaaaatattcttcataaccggcaagaaagtgaaaagttcacattgaaactatgtcagtagtatacatcatgaaatgatgatatatatatactctattttggtggaggattatatgatataattcgtggataatcatttttaagacacatttctttattcgtaaatcttttcacgttaaatgagtgtccatattttgcaatttcttcatatgatggcggtgtacgtggacgaggctgctcctgttcttgttgtggtcgccgactgtcgtgtctgcgtttagatccctccattatcgcgattgcgtagatggagtactattttataccttgtaattaaatttttttattaattaaacgtataaaaacgttccgtatctgtatttaagagccagatttcgtctaatagaacaaatagctacagtaaaaataactagaataattgctacacccactagaaaccacggatcgtaatacggcaatcggttttcgataataggtggaacgtatattttatttaaggacttaacaattgtctgtaaaccacaatttgcttccgcggatcctgtattaactatctgtaaaagcatatgttgaccgggcggagccgaacattctccgatatctaatttctgtatatctataatattattaacctccgcatacgcattacagttcttttctagcttggataccgcactaggtacatcgtctagatctattcctatttcctcagcgatagctcttctatccttttccggaagcaatgaaatcacttcaataaatgattcaaccatgagtgtgaaactaagtcgagaattactcatgcatttgttagttattcggagcgcgcaatttttaaactgtcctataacctctcctatatgaatagcacaagtgacattagtagggatagaatgttgagctaatttttgtaaataactatctataaaaagattatacaaagttttaaactctttagtttccgccatttatccagtctgagaaaatgtctctcataataaatttttccaagaaactaattgggtgaagaatggaaacctttaatctatatttatcacagtctgttttggtacacatgatgaattcttccaatgccgtactaaattcgatatctttttcgatttctggatatgtttttaataaagtatgaacaaagaaatggaaatcgtaataccagttatgtttaactttgaaattgttttttattttcttgttaatgattccagccacttgggaaaagtcaaagtcgtttaatgccgatttaatacgttcattaaaaacaaactttttatcctttagatgaattattattggttcattggaatcaaaaagtaagatattatcgggtttaagatctgcgtgtaaaaagttgtcgcaacagggtagttcgtagattttaatgtataacagagccatctgtaaaaagataaactttatgtattgtaccaaagatttaaatcctaatttgatagctaactcggtatctactttatctgccgaatacagtgctaggggaaaaattataatgtttcctctttcatattcgtagttagttctcttttcatgttcgaaaaagtgaaacatgcggttaaaatagtttataacattaatattactgttaataactgccggataaaagtgggatagtaatttcacgaatttgatactgtcctttctctcgttaaacgcctttaaaaaaactttagaagaatatctcaatgagagttcctgaccatccatagtttgtatcaataatagcaacatatgaagaacacgtttatacagagtatgtaaaaatgttaatttatagtttaatcccatggcccacgcacacacgattaattttttttcatctccctttagattgttgtatagaaatttgggtactgtgaactccgccgtagtttccatgggactatataattttgtggcctcgaatacaaattttactacatagttatctatcttaaagactataccatatcctcctgtagatatgtgataaaaatcgtcgtttataggataaaatcgtttatccttttgttggaaaaaggatgaattaatgtaatcattctcttctatctttagtagtgtttccttattaaaattcttaaaataatttaacaatctaactgacggagcccaattttggtgtaaatctaattgggacattatattgttaaaatacaaacagtctcctaatataacagtatctgataatctatggggagacatccattgatattcaggggatgaatcattggcaacacccatttattgtacaaaaagccccaatttacaaacgaaagtccaggtttgatagagacaaacaattaactattttgtctctgtttttaacacctccacagtttttaatttctttagtaatgaaattattcacaatatcagtatcttctttatctaccagagattttactaacttgataaccttggctgtctcattcaatagggtagtaatatttgtatgtgtgatattgatatctttttgaattgtttcttttagaagtgattctttgatggtgccagcatacgaattacaataatgcagaaactcggttaacatgcaggaattatagtaagccaattccaattgttgcctgtgttgtattagagtgtcaatatgagcaatggtgtccttgcgtttctctgatagaatgcgagcagcgattttggcgttatcatttgacgatatttctggaatgacgaatcctgtttctactaactttttggtaggacaaagtgaaacaatcaagaagatagcttctcctcctatttgtggaagaaattgaactcctctagatgatctactgacgatagtatctccttgacagatattggaccgaattacagaagtacctggaatgtaaagccctgaaaccccctcattttttaagcagattgttgccgtaaatcctgcactatgcccaagatagagagctcctttggtgaatccatctctatgtttcagtttaaccaagaaacagtcagctggtctaaaatttccatctctatctaatacagcatctaacttgatgtcaggaactatgaccggtttaatgttatatgtaacattgagtaaatccttaagttcataatcatcactgtcatcagttatgtacgatccaaacaatgtttctaccggcatagtggatacgaagatgctatccatcagaatgtttccctgattagtattttctatatagctattcttctttaaacgattttccaaatcagtaactatgttcatttttttaggagtaggacgcctagccagtatggaagaggattttctagatcctctcttcaacatctttgatctcgatggaatgcaaaaccccatagtgaaacaaccaacgataaaaataatattgtttttcactttttataattttaccatctgactcatggattcattaatatctttataagagctactaacgtataattctttataactgaactgagatatatacaccggatctatggtttccataattgagtaaatgaatgctcggcaataactaatggcaaatgtatagaacaacgaaattatactagagttgttaaagttaatattttctatgagctgttccaataaattatttgttgtgactgcgttcaagtcataaatcatcttgatactatccagtaaaccgtttttaagttctggaatattatcatcccattgtaaagcccctaattcgactatcgaatatcctgctctgatagcagtttcaatatcgacggacgtcaatactgtaataaaggtggtagtattgtcatcatcgtgataaactacgggaatatggtcgttagtaggtacggtaactttacacaacgcgatatataactttccttttgtaccatttttaacgtagttgggacgtcctgcagggtattgttttgaagaaatgatatcgagaacagatttgatacgatatttgttggattcctgattattcactataatataatctagacagatagatgattcgataaatagagaaggtatatcgttggtaggataatacatccccattccagtattctcggatactctattgatgacactagttaagaacatgtcttctattctagaaaacgaaaacatcctacatggactcattaaaacttctaacgctcctgattgtgtctcgaatgcctcgtacaaggatttcaaggatgccatagattctttgaccaacgatttagaattgcgtttagcatctgatttttttattaaatcgaatggtcggctctctggtttgctaccccaatgataacaatagtcttgtaaagataaaccgcaagaaaatttatacgcatccatccaaataaccctagcaccatcggatgatattaatgtattattatagattttccatccacaattattgggccagtatactgttagcaacggtatatcgaatagattactcatgtaacctactagaatgatagttcgtgtactagtcataatatctttaatccaatctaaaaaatttaaaattagattttttacactgttaaagttaacaaaagtattacccgggtacgtggatatcatatatggcattggtccattatcagtaatagctccataaactgatacggcgatggtttttatatgtgtttgatctaacgaggaagaaattcgcgcccacaattcatctctagatatgtatttaatatcaaacggtaacacatcaatttcgggacgcgtatatgtttctaaatttttaatccaaatataatgatgacctatatgccctattatcatactgtcaactatagtacacctagggaacttacgatacatctgtttcctataatcgttaaattttacaaatctataacatgctaaaccttttgacgacagccattcattaatttctgatatggaatctgtattctcgataccgtatcgttctaaagccagtgctatatctccctgttcgtgggaacgctttcgtataatatcgatcaacggataatctgaagtttttggagaataatatgactcatgatctatttcgtccataaacaatctagacataggaattggaggcgatgatcttaattttgtgcaatgagtcgtcaatcctataacttctaatcttgtaatattcatcatcgacataatactatctatgttatcatcgtatattagtataccatgaccttcttcatttcgtgccaaaatgatatacagtcttaaatagttacgcaatatctcaatagtttcataattgttagctgttttcatcaaggtttgtatcctgtttaacatgatggcgttctataacgtctctattttctatttttaattttttaaatttttaacgatttactgtggctagatacccaatctctctcaaatatttttttagcctcgcttacaagctgtttatctatactattaaaactgacgaatccgtgattttggtaatgggttccgtcgaaatttgccgaagtgatatgaacatattcgtcgtcgactatcaacaattttgtattattctgaatagtgaaaaccttcacagatagatcattttgaacacacaacgcatctagacttttggcggttgccatagaatatacgtcgttcttatcccaattaccaactagaagtctgatcttaactcctctattaatggctgcttctataatggagttgtaaatgtcgggccaatagtagctattaccgtcgacacgtgtagtgggaactatggccaaatgttcaatatctatactagtcttagctgacctgagtttatcaataactacatcggtatctagatctctagaatatcccaataggtgttccggagaatcagtaaagaacactccacctataggattcttaatatgatacgcagtgctaactggcaaacaacaagccgcagagcataaattcaaccatgaattttttgcgctattaaaggctttaaaagtatcaaatcttctacgaagatctgtggccagcgggggataatcagaatatacacctaacgttttaatcgtatgtatagatcctccagtaaatgacgcgtttcctacataacatctttcatcatctgacacccaaaaacaaccgagtagtagtcccacattattttttttatctatattaacggttataaaatttatatccgggcagtgactttgtagctctcccagatttcttttccctcgttcatctagcaaaactattattttaatccctttttcagatgcctcttttagtttatcaaaaataagcgctcccctagtcgtactcagaggattacaacaaaaagatgctatgtatatatatttcttagctagagtgataatttcgttaaaacattcaaatgttgttaaatgatcggatctaaaatccatattttctggtagtgtttctaccagcctacattttgctcccgcaggtaccgatgcaaatggccacatttagttaacataaaaacttatacatcctgttctatcaacgattctagaatatcatcggctatatcgctaaaattttcatcaaagtcgacatcacaacctaactcagtcaatatattaagaagttccatgatgtcatcttcgtctatttctatatccgtatccattgtagattgttgaccgattatcgagtttaaatcattactaatactcaatccttcagaatacaatctgtgtttcattgtaaatttataggcggtgtatttaagttggtagattttcaattatgtattaatatagcaacagtagttcttgctcctccttgattctagcatcctcttcattattttcttctacgtacataaacatgtccaatacgttagacaacacaccgacgatggcggccgctacagacacgaatatgactaaaccgatgaccatttaaaaacccctctctagctttcacttaaactgtatcgatcattcttttagcacatgtataatataaaaacattattctatttcgaatttaggcttccaaaaatttttcatccgtaaaccgataataatatatatagacttgttaatagtcggaataaatagattaatgcttaaactatcatcatctccacgattagagatacaatatttacattctttttgctgtttcgaaactttatcaatacacgttaatacaaacccaggaaggagatattgaaactgaggctgttgaaaatgaaacggtgaatacaataattcagataatgtaaaatcatgattccgtattctgatgatattagaactgctaatggatgtcgatggtatgtatctaggagtatctattttaacaaagcatcgatttgctaatatacaattatccttttgattaattgttattttattcatattcttaaaaggtttcatatttatcaattcttctacattaaaaatttccatttttaatttatgtagccccgcaatactcctcattacgtttcattttttgtctataatatccattttgttcatctcggtacatagattatccaattgagaagcgcatttagtagttttgtacattttaagtttattgacgaatcgtcgaaaactagttatagttaacattttattatttgataccctgatattaatacccctgccgttactattatttataactgatgtaatccacgtaacattggaattaactatcgatagtaatgcatcgacgcttccaaaattgtctattataaactcaccgataatttttttattgcatgttttcatattcattaggattatcaaatctttaatcttattacgattgtatgcgttgatattacaagacgtcattctaaaagacggaggatctccatcaaatgccagacaatcacgtacaaagtacatggaaataggttttgttctattgcgcatcatagatttatatagaacacccgtagaaatactaatttgttttactctataaaatactaatgcatctatttcatcgttttgtataacgtctttccaagtgtcaaattccaaatttttttcattgatagtaccaaattcttctatctctttaactacttgcatagataggtaattacagtgatgcctacatgccgttttttgaaactgaatagatgcgtctagaagcgatgctacgctagtcacaatcaccactttcatatttagaatatatatatgtaaaaatatagtagaatttcattttgtttttttctatgctataaatgaattctcattttgcatctgctcatactccgttttatattaataccaaagaaggaagatatctggttctaaaagccgttaaagtatgcgatgttagaactgtagaatgcgaaggaagtaaagcttcctgcgtactcaaagtagataaaccctcatcgcccgcgtgtgagagaagaccttcgtccccgtccagatgcgagagaatgaataaccctggaaaacaagttccgtttatgaggacggacatgctacaaaatatgttcgcggctaatcgcgataatgtagcttctagacttttgtcctaaaatactattatatccttttcgatattaataaatccgtgtcgtccaggttttttatctctttcagtatgtgaatagataggtattttatctctattcatcatcgaatttaagagatccgataaacattgtttgtattctccagatgtcagcatctgatacaacaatatatgtgcacataaacctctggcacttatttcatgtaccttccccttatcactaaggagaatagtatttgagaaatatgtatacatgatattatcatgaattagatatacagaatttgtaacactctcgaaatcacacgatgtgtcggcgttaagatctaatatatcactcgataacacattttcatctagatacactagacattttttaaagctaaaatagtctttagtagtaacagtaactatgcgattattttcatcgatgatacatttcatcggcatattattacgcttaccatcaaagactataccatgtgtatatctaacgtattctagcatggttgccatacgcgcattaaacttttcaggatctttggatagatcttccaatctatctatttgagaaaacatttttatcatgttcaatagttgaaacgtcggatccactatatagatattatctataaagattttaggaactacgttcatggtatcctggcgaatattaaaactatcaatgatatgattatcgttttcatcttttatcaccatatagtttctaagatatgggattttacttaatataatattatttcccgtgataaattttattagaaaggccaaatctataagaaaagtcctagaattagtctgaagaatatctatatcgccgtatagtatatttggattaattagatatagagaatatgatccgtaacatatacaacttttattatggcgtctaagatattcttccatcaacttattaacatttttgactagggaagatacattatgacgtcccattacttttgccttgtctattactgcgacgttcatagaatttagcatatctcttgccaattcttccattgatgttacattataagaaattttagatgaaattacatttggagctttaatagtaagaactcctaatatgtccgtgtatgtggtcactaatacagattgtagttctataatcgtaaataatttacctatattatatgtttgagtctgtttagaaaagtagctaagtatacgatcttttatttctgatgcagatgtattaacatcggaaaaaaatctttttttattcttttttactaaagatacaaatatgtctttgttaaaaacagttattttctgaatatttctagcttgtaattttaacatatgatattcgttcacactaggtactctgcctaaataggtttctataatctttaatgtaatattaggaaaagtattctgatcaggattcctattcattttgaggatttaaaactctgattattgtctaatatggtctctacgcaaactttttcacagagcgatagagtttttgataactcgtttttcttaagaaatataaaactactgtctccagagctcgctctatcttttattttatctaattcgatacaaactcctgatactggttcagaaagtaattcattaattttcagtcctttatagaagatatttaatatagataatacaaaatcttcagtttttgatatcgatctgattgatcctagaactagatatattaataacgtgctcattaggcagtttatggcagcttgataattagatatagtatattccagttcatatttattagataccgcattgcccagattttgatattctatgaattcctctgaaaataaatccaaaataactagacattctattttttgtggattagtgtactctcttccctctatcatgttcactactggtgtccacgatgataaatatctagagggaatataatatagtccataggatgccaatctagcaatgtcgaataactgtaattttattcttcgctcttcattatgaattgattcttgaggtataaacctaacacaaattatattattagacttttcgtatgtaatgtctttcatgttataagtttttaatcctggaatagaatctattttaatgaggcttttaaacgcagagttctccaacgagtcaaagcataatactctgttgtttttcttatatacgatgttacgattttcttctttgaatggaataggtttttgaattagtttataattacaacataatagataaggaagtgtgcaaatagtacgcggaaaaaacataatagctcccctgttttcatccatggttttaagtaaatgatcactggcttctttagtcaatggatattcgaacattaaccgtttcatcatcattggacagaatccatatttcttaatgtaaagagtgatcaaatcattgtgtttattgtaccatcttgttgtaaatgtgtattcggttatcggatctgctcctttttctattaaagtatcgatgtcaatctcgtctaagaattcaactatatcgacatatttcatttgtatacacataaccattactaacgtagaatgtataggaagagatgtaacgggaacagggtttgttgattcgcaaactattctaatacataattcttctgttaatacgtcttgcacgtaatctattatagatgccaagatatctatataattattttgtaagatgatgttaactatgtgatctatataagtagtgtaataattcatgtattttgatatatgttccaactctgtctttgtgatgtctagtttcgtaatatctatagcatcctcaaaaaatatattcgcatatattcccaagtcttcagttctatcttctaaaaaatcttcaacgtatggaatataataatctattttacctcttctgatatcattaatgatatagtttttgacactatcttctgtcaattgattcttattcactatatctaagaaacggatagcgtccctaggacgaactactgccattaatatctctattatagcttctggacataattcatctattataccagaattaatgggaactattccgtatctatctaacatagttttaagaaagtcagaatctaagacttgatgttcatatattggttcatacatgaaatgatctctattgatgatagtgactatttcattctctgaaaattggtaactcattctatatatgctttccttgttgatgaaggatagaatatactcaatagaatttgtaccaacaaactgttctcttatgaatcgtatatcatcatctgaaataatcatgtaaggcatacatttaacaattagagacttgtctcctgttatcaatatactattcttgtgataatttatgtgtgaggcaaatttgtccacgttctttaattttgttatagtagatatcaaatccaatggagctacagttcttggcttaaacagatatagtttttctggaacaaattctacaacattattataaaggactttgggtaaataagtgggatgaaatcctattttaattaatgcgatagccttgtcctcgtgcagatatccaaacgcttttgtgatagtatggcattcattgtctagaaacgctctacgaatatctgtgacagatatcatctttagagaatatactagtcgcgttaatagtactacaatttgtattttttaatctatctcaataaaaaaattaatatgtatgattcaatgtataactaaactactaactgttattgataactagaatcagaatctaatgatgacgtacccaagaagtttatctactgccaatttagctgcattatttttagcatctcgtttagattttccatctgccttatcgaatactcttccgtcgatatctacacaggcataaaatgtaggagagttactaggcccaactgattcaatacgaaaagaccaatctctcttagttatttggcagtactcattaataacggtgacagggttagcatctttccaatcaataatttttttagccggaataacatcatcaaaagacttatgatcctctctcattgatttttcgcgggatacatcatctattatgacgtcagccataacatcagcatccggcttatccgcctccgttgtcataaaccaacgaggaggaatatcgtcggagctgtacaccatagcactacgttgaagatcgtacagagctttattaacttctcgcttctccatattaagttgtctagttagttgtgcagcagtagctccttcgattccaatggttttaatagcctcacacacaatctctgcgttagaacgttcgtcgatatagattttagacatttttagagagaactaacacaaccagcaataaaactgaacctactttatcatttttttattcatcatcctctggtggttcgtcgttcctatcaaatgtagctctgattaacccgtcatctataggtgatgctggttctggagattctggaggagatggattattatctggaagaatctctgttatttccttgttttcatgtatcgattgcgttgtaacattaagattgcgaaatgctctaaatttgggaggcttaaagtgttgtttgcaatctctacacgcgtgtctaactagtggaggttcgtcagctgctctagtttgaatcatcatcggcgtagtattcctacttttacagttaggacacggtgtattgtatttctcgtcgagaacgttaaaataatcgttgtaactcacatcctttattttatctatattgtattctactcctttcttaatgcattttataccgaataagagatagcgaaggaattctttttcggtgccgctagtacccttaatcatatcacatagtgttttatattccaaatttgtggcaatagacggtttatttctatacgatagtttgtttctggaatcctttgagtattctataccaatattattctttgattcgaatttagtttcttcgatattagattttgtattacctatattcttgatgtagtactttgatgatttttccatggcccattctattaagtcttccaagttggcatcatccacatattgtgatagtaattctcggatatcagtagcggctaccgccattgatgtttgttcattggatgagtaactactaatgtatacattttccatttataacacttatgtattaactttgttcatttatattttttcattattatgttgatattaacaaaagtgaatatatatatatgttaataattgtattgtggttatacggctacaattttataatgagtgaaagtcagtgtccgatgatcaatgacgatagctttactctgaaaagaaagtatcaaatcgatagtgcggagtcaacaataaaaatggataagaagaggataaagtttcagaatagagccaaaatggtaaaagaaataaatcagacaataagagcagcacaaactcattacgagacattgaaactaggatacataaaatttaagagaatgattaggactactactctagaagatatagcaccatctattccaaataatcagaaaacttataaactattctcggacatttcagccatcggcaaagcatcacagaatccgagtaagatggtatatgctctgctgctttacatgtttcccaatttgtttggagatgatcatagattcattcgttatagaatgcatccaatgagtaaaatcaaacacaagatcttctctcctttcaaacttaatcttattagaatattagtggaagaaagattctataataatgaatgcagatctaataaatggaaaataattggaacacaagttgataaaatgttgatagctgaatctgataaatatacaatagatgcaaggtataacctaaaacccatgtatagaatcaagggagaatctgaagaagataccctcttcatcaaacagatggtagaacaatgtgtgacatcccaggaattggtggaaaaagtgttgaagatactgtttagagatttgttcaagagtggagaatacaaagcgtacagatacgatgatgatgtagaaaatggatttattggattggatacactaaaattaaacattgttcatgatatagttgaaccatgtatgcctgttcgtaggccagtggctaagatactgtgtaaagaaatggtaaataaatactttgagaatccgctacatattattggtaagaatcttcaagagtgcattgactttgttagtgaataggcatttcatctttctccaatactaattcaaattgttaaattaataatggatagtataaatagtaaaaataattattagaataagagtgtagtatcatagataactctcttctataaaaatggattttattcgtagaaagtatcttatatacacagtagaaaataatatagattttttaaaggatgatacattaagtaaagtaaacaattttaccctcaatcatgtactagctctcaagtatctagttagcaattttcctcaacacgttattactaaggatgtattagctaataccaatttttttgttttcatacatatggtacgatgttgtaaagtgtacgaagcggttttacgacacgcatttgatgcacccacgttgtacgttaaagcattgactaagaattatttatcgtttagtaacgcaatacaatcgtacaaggaaaccgtgcataaactaacacaagatgaaaaatttttagaggttgccgaatacatggacgaattaggagaacttataggcgtaaattatgacttagttcttaatccattatttcacggaggggaacccatcaaagatatggaaatcatttttttaaaactgtttaagaaaacagacttcaaagttgttaaaaaattaagtgttataagattacttatttgggcatacctaagcaagaaagatacaggcatagagtttgcggataatgatagacaagatatatatactctatttcaacaaactggtagaatcgtccatagcaatctaacagaaacgtttagagattatatctttcccggagataagactagctattgggtgtggttaaacgaaagtatagctaatgatgcggatatcgttcttaatagacccgccattaccatgtatgataaaattcttagttatatatactctgagataaaacaaggacgcgttaataaaaacatgcttaagttagtttatatctttgagcctgaaaaagatatcagagaacttctgctagaaatcatatatgatattcctggagatatcctatctattattgatgcaaaaaacgacgattggaaaaaatattttattagtttttataaagctaattttattaacggtaatacatttattagtgatagaacgtttaacgaggacttattcagagttgttgttcaaatagatcccgaatatttcgataatgaacgaattatgtctttattctctacgagtgctgcggacattaaacgatttgatgagttagatattaataacagttatatatctaatataatttatgaggtgaacgatatcacattagatacaatggatgatatgaagaagtgtcaaatctttaacgaggatacgtcgtattatgttaaggaatacaatacatacctgtttttgcacgagtcggatcccatggtcatagagaacggaatactaaagaaactgtcatctataaaatccaagagtagacggctgaacttgtttagcaaaaacattttaaaatattatttagacggacaattggctcgtctaggtcttgtgttagatgattataaaggagacttgttagttaaaatgataaaccatcttaagtctgtggaggatgtatccgcattcgttcgattttctacagataaaaaccctagtattcttccatcgctaatcaaaactattttagctagttataatatttccatcatcgtcttatttcaaaggtttttgagagataatctatatcatgtagaagaattcttggataaaagcatccatctaaccaagacggataagaaatatatacttcaattgataagacacggtagatcatagaacagaccaaatatattattaataatttgtatatacatagatataattatcacacatttttgataaatgggaactgctgcaacaattcagactcccaccaaattaatgaataaagaaaatgcagaaatgattttggaaaaaattgttgatcatatagttatgtatattagtgacgaatcaagtgattcagaaaataatcctgaatatattgattttcgtaacagatacgaagactatagatctctcattataaaaagtgatcacgagtttgtaaagctatgtaaaaatcatgcggagaaaagttctccagaaacgcaacaaatgattatcaaacacatatacgaacaatatcttattccagtatctgaagtactattaaaacctataatgtccatgggtgacataattacatataacggatgtaaagacaatgaatggatgctagaacaactctctaccctaaactttaacaatctccgcacatggaactcatgtagcataggcaatgtaacgcgtctgttttatacattttttagttatctgatgaaagataaactaaatatataagtataatcccattctaatactttaacctgatgtattagcatcttattagaatattaacctaactaaaagacataacataaaaactcattacatagttgataaaaagcggtaggatataaatattatggctgccaccgttccgcgttttgacgacgtgtacaaaaatgcacaaagaagaattctagatcaagaaacattttttagtagaggtctaagtagaccgttaatgaaaaacacatatctatttgataattacgcgtatggatggataccagaaactgcaatttggagtagtagatacgcaaacttagatgcaagtgactattatcccatttcgttgggattacttaaaaagttcgagtttctcatgtctctatataaaggtcctattccagtatacgaagaaaaagtaaatactgaattcattgctaatggatctttctccggtagatacgtatcatatcttagaaagttttctgctcttccaacaaacgagtttattagttttttgttactgacttccattccaatctataatatcttgttctggtttaaaaatactcagtttgatattactaaacacacattattcagatacgtctatacagataatgccaaacacctggcgttggctaggtatatgtatcaaacaggagactataagcctttgtttagtcgtctcaaagagaattatatatttaccggtcccgttccaatatgtatcaaagatatagatcaccctaatcttagtagagcaagaagtccatccgattatgagacattagctaatattagtactatattgtactttaccaagtatgatccggtattaatgtttttattgttttacgtacctgggtattcaattactacaaaaattactccagccgtagaatatctaatggataaactgaatctaacaaagagcgacgtacaactgttgtaaattattttatgcttcgtaaaatgtaggttttgaaccaaacattctttcaaagaatgagatgcataaaactttattatccaatagattgactatttcggacgtcaatcgtttaaagtaaacttcgtaaaatattctttgatcactgccgagtttaaaacttctatcgataattgtttcatatgttttaatatttacaagttttttggtccatggtccattaggacaaatatatgcaaaataatatcgttctccaagttctatagtctctggattatttttattatattcagtaaccaaatacatattagggttatctgcggatttataatttgagtgatgcattcgactcaacataaataattctagaggagacgatctactatcaaattcggatcgtaaatctgtttctaaagaacggagaatatctatacatacctgattagaattcatccgtccttcagacaacatctcagacagtctggttttgtacatcttaatcatattcttatgaaacttggaaacatctcttctagtttcactagtacctttattaattctctcaggtacagattttgaattcgacgatgctgagtatttcatcgttgtatatttcttcttcgattgcataatcagattcttatataccgcctcaaactctattttaaaattattaaacaatactctattattaatcagtcgttctaactctttcgctatttctatagacttatctacatcttgactgtctatctctgtaaacacggagtcggtatctccatacacgctacgaaaacgaaatctgtaatctataggcaacgatgttttcacaatcggattaatatctctatcgtccatataaaatggattacttaatggattggcaaaccgtaacataccgttagataactctgctccatttagtaccgattctagatacaagatcattctacgtcctatggatgtgcaactcttagccgaagcgtatgagtatagagcactatttctaaatcccatcagaccatatactgagttggctactatcttgtacgtatattgcatggaatcatagatggccttttcagttgaactggtagcctgttttagcatctttttatatctggctctctctgccaaaaatgttcttaatagtctaggaatggttccttctatcgatctatcgaaaattgctatttcagagatgaggttcggtagtctaggttcacaatgaaccgtaatatatctaggaggtggatatttctgaagcaatagctgattatttatttcttcttccaatctattggtactaacaacgacaccgactaatgtttccggagatagatttccaaagatacacacattaggatacagactgttataatcaaagattaatacattattactaaacattttttgttttggagcaaataccttaccgccttcataaggaaacttttgttttgtttctgatctaactaagatagttttagtttccaacaatagctttaacagtggacccttgatgactgtactcgctctatattcgaataccatggattgaggaagcacatatgttgacgcacccgcgtctgtttttgtttctactccataatactcccacaaatactgacacaaacaagcatcatgaatacagtatctagccatatctaaagctatgtttagattataatccttatacatctgagctaaatcaacgtcatcctttccgaaagataatttatatgtatcattaggtaaagtaggacataatagtacgactttaaatccattttcccaaatatctttacgaattactttacatataatatcctcatcaacagtcacataattacctgtggttaaaacctttgcaaatgcagcggctttgcctttcgcgtctgtagtatcgtcaccgatgaacgtcatttctctaactcctctatttaatactttacccatgcaactgaacgcgttcttggatatagaatccaatttgtacgaatccaatttttcaaatttttgaatgaatgaatatagatcgaaaaatatagttccattattgttattaacgtgaaacgtagtattggccatgccgcctactcccttatgactagactgatttctctcataaatacagagatgtacagcttcctttttgtccggagatctaaagataattttctctcctgttaataactctagacgattagtaatatatctcagatcaaagttatgtccgttaaaggtaacgacgtagtcgaacgttagttccaacaattgtttagctattcgtaacaaaactatttcagaacatagaactagttctcgttcgtaatccatttccattagtgactgtatcctcaaacatcctctatcgacggcttcttgtatttcctgttccgttaacatctcttcattaatgagcgtaaacaataatcgtttaccacttaaatcgatataacagtaacttgtatgcgagattgggttaataaatacagaaggaaacttcttatcgaagtgacactctatatctagaaataagtacgatcttgggatatcgaatctaggtatttttttagcgaaacagttacgtggatcgtcacaatgataacatccattgttaatctttgtcaaatattgctcgtccaacgagtaacatccgtctggagatatcccgttagaaatataaaaccaactaatattgagaaattcatccatggtggcattttgtatgctgcgtttctttggctcttctatcaaccacatatctgcgacggagcattttctatctttaatatctagattataacttattgtctcgtcaatgtctatagttctcatctttcccaacggcctcgcattaaatggaggaggagacaatgactgatatatttcgtccgtcactacgtaataaaagtaatgaggaaatcgtataaatacggtctcaccatttcgacatctggatttcagatataaaaatctgttttcaccgtgactttcaaaccaattaatgcaccgaacatccatttatagaatttagaaatatattttcatttaaatgaatcccaaacattggggaagagccgtatggaccattatttttatagtactttcgcaagcgggtttagacggcaacatagaagcgtgtaaacgaaaactatatactatagttagcactcttccatgtcctgcatgtagacggcacgcgactatcgctatagaggacaataatgtcatgtctagcgatgatctgaattatatttattattttttcatcagattatttaacaatttggcatctgatcccaaatacgcgatcgatgtgacaaaggttaaccctttataaacttaacccattataaaacttatgattagtcacaactgaaataaccgcgtgattattttttggtataattctacacggcatggtttctgtgactatgaattcaacccccgttacattagtgaaatctttaacaaacagcaagggttcgtcaaagacataaaactcattgtttacaatcgaaatagaccccctatcacacttaaaataaaaaatatccttatcctttaccaccaaataaaattctgattggtcaatgtgaatgtattcacttaacagttccacaaatttatttattaactccgaggcacatacatcgtcggtattttttatggcaaactttactcttccagcatccgtttctaaaaaaatattaacgagttccatttatatcatccaatattattgaaatgacgttgatggacagatgatacaaataagaaggtacggtacctttgtccaccatctcctccaattcatgctctattttgtcattaactttaatgtatgaaaacagtacgccacatgcttccatgacagtgtgtaacactttggatacaaaatgtttgacattagtataattgttcaagactgtcaatctataatagatagtagctataatatattctatgatggtattgaagaagatgacaaccttggcatattgatcatttaacacagacatggtatcaacagatagcttgaatgaaagagaatcagtaattggaataagcgtcttctcgatagagtgtccgtataccaacatgtctgatattttgatgtattccattaaattatttagttttttctttttattctcgttaaacagcatttctgtcaacggaccccaacatcgttgaccgattaagttttgattgatttttccgtgtaaggcgtatctagtcagatcgtatagcctatccaataatccatcatctgtgcgtagatcacatcgtacactttttaattctctatagaagagcgacagacatctggagcaattacagacagcaatttctttattctctacagatgtaagatacttgaagacattcctatgatgatgcagaattttggataacacggtattgatggtatctgttaccataattcctttgatggctgatagtgtcagagcacaagatttccaatctttgacaatttttagcaccattatctttgttttgatatctatatcagacagcatggtgcgtctgacaacacagggattaagacggaaagatgaaatgattctctcaacatcttcaatagataccttgctattttttctggcattatctatatgtgcgagaatatcctctagagaatcagtatcctttttgatgatagtggatctcaatgacatgggacgtttaaaccttcttattctatcaccagattgcatggtgatttgtcttctttcttttatcataatgtaatctctaaattcatcggcaaattgtctatatctaaaatcataatatgagatgtttacctctacaaatatctgttcgtccaatgttagagtatttacatcagttttgtattccaaattaaacatggcaacggatttaattttatattcctctattaagtcctcgtcgataataacagaatgtagataatcatttaatccatcgtacatggttggaagatgcttgttgacaaaatctttaattgtcttgatgaaggtgggactatatctaacatcttgattaataaaatttataacattgtccataggatactttgtaactagttttatacacatctcttcatcggtaagtttagacagaatatcgtgaacaggtggtatattatattcatcagatatacgaagaacaatgtccaaatctatattgtttaatatattatatagatgtagcgtagctcctacaggaatatctttaactaagtcaatgatttcatcaaccgttagatctattttaaagttaatcatataggcattgatttttaaaaggtatgtagccttgactacattctcattaattaaccattccaagtcactgtgtgtaagaagattatattctatcataagcttgactacatttggtcccgataccattaaagaattcttatgatataaggaaacagcttttaggtactcatctactctacaagaattttggagagccttaacgatatcagtgacgtttattatttcaggaggaaaaaacctaacattgagaatatcggaattaatagcttccagatacagtgattttggcaatagtccgtgtaatccataatccagtaacacgagctggtgcttgctagacaccttttcaatgtttaatttttttgaaataagctttgataaagccttcctcgcaaattccggatacatgaacatgtcggcgacatgattaagtattgttttttcattattttctcaataccccaatagatgatagaatatcacccaatgcgtccatgttgtctatttccaacaggtcgctatatccaccaatagaagtttttccaaaaaagattctaggaacagttctaccaccagtaatttgttcaaaatagtcacgcaattcattttcgggtttaaattctttaatatcgacaatttcatacgctcctcttttgaaactaaacttatttagaatatccagtgcatttctacaaaaaggacatgtatacttgacaaaaattgtcactttgttattggccaacctttgttgtacaaattcctcggccattttaatatttaagtgatataaaactatctcgacttatttaactctttagtcgagatatatggacgcagatagctatatgatagccaactacagaaggcaaacgctataaaaaacataattacgacgagcatatttataaatatttttattcagcattacttgatatagtaatattaggcacagtcaaacattcaaccactctcgatacattaactctctcattttctttaacaaattctgcaatatcttcgtaaaaagattcttgaaactttttagaatatctatcgactctagatgaaatagcgttcgtcaacatactatgttttgtatacataaaggcgcccattttaacagtttctagtgacaaaatgctagcgatcctaggatcctttagaatcacatagattgacgattcgtctctcttagtaactctagtaaaataatcatacaatctagtacgcgaaataatattatccttgacttgaggagatctaaacaatctagttttgagaacatcgataagttcatcgggaatgacatacatactatctttaatagaactcttttcatccagttgaatggattcgtccttaaccaactgattaatgagatcttctattttatcattttccagatgatatgtatgtccattaaagttaaattgtgtagcgcttctttttagtctagcagccaatactttaacatcactaatatcgatatacaaaggagatgatttatctatggtattaagaattcgtttttcgacatccgtcaaaaccaattcctttttgcctgtatcatccagttttccatcctttgtaaagaaattattttctactagactattaataagactgataaggattcctccataattgcacaatccaaactttttcacaaaactagactttacaagatctacaggaatgcgtacttcaggttttttagcttgtgattttttcttttgcggacattttcttgtgaccaactcatctaccatttcattgattttagcagtgaaataagctttcaatgcacgggcactgatactattgaaaacgagttgatcttcaaattccgccatttaagttcaccaaacaacttttaaatacaaatatatcaatagtagtagaataagaactataaaaaaaataataattaaccaataccaaccccaacaaccggtattattagttgatgtgactgttttctcatcacttagaacagatttaacaatttctataaagtctgtcaaatcatcttccggagaccccataaatacaccaaatatagcggcgtacaacttatccatttatacattgaatattggcttttctttatcgctatcttcatcatattcatcatcaatatcaacaagtcccagattacgagccagatcttcttctacattttcagtcattgatacacgttcactatctccagagagtccgataacgttagccaccacttctctatcaatgattagtttcttgagcgcgaaagtaatttttgtttccgttccggatctatagaagacgataggtgtgataattgccttggccaattgtctttctcttttactgagtgattctagttcaccttctatagatctgagaatggatgattctccagtcgaaacatattctaccatggatccgtttaatttgttgatgaagatggattcatccttaaatgttttctctgtaatagtttccaccgaaagactatgcaaagaatttggaatgcgttccttgtgcttaatgtttccatagacggcttctagaagttgatacaacataggactagccgcggtaacttttatttttagaaagtatccatcgcttctatcttgtttagatttatttttataaagtttagtctctccttccaacataataaaagtggaagtcatttgactagataaactatcagtaagttttatagagatagacgaacaattagcgtattgagaagcatttagtgtaacgtattcgatacattttgcattagatttactaatcgattttgcatactctataacacccgcacaagtctgtagagaatcgctagatgcagtaggtcttggtgaagtttcaactctcttcttgattaccttactcatgattaaacctaaataattgtactttgtaatataatgatatatattttcactttatctcatttgagaataaaaatgtttttgtttaaccactgcatgatgtacagatttcggaatcgcaaaccaccagtggttttattttatccttgtccaatgtgaattgaatgggagcggatgcgggtttcgtacgtagatagtacattcccgtttttagaccgagactccatccgtaaaaatgcatactcgttagtttggaataactcggatctgctatatggatattcatagattgactttgatcgatgaaggctcccctgtctgcagccatttttatgatcgtcttttgtggaatttcccaaatagttttataaactcgcttaatatcttctggaaggtttgtattctgaatggatccaccatctgccataatcctattcttgatctcatcattccataattttctctcggttaaaactctaaggagatgcggattaactacttgaaattctccagacaatactctccgagtgtaaatattactggtatacggttccaccgactcattatttcccaaaatttgagcagttgatgcagtcggcataggtgccaccaataaactatttctaagaccgtatgttctgattttatcttttagaggttcccaattccaaagatccgacggtacaacattccaaagatcatattgtagaataccgttactggcgtacgatcctacatatgtatcgtatggtccttccttctcagctagttcacaactcgcctctaatgcaccgtaataaatggtttcgaagatcttcttatttagatcttgtgcttccaggctatcaaatggataatttaagagaataaacgcgtccgctaatccttgaacaccaataccgataggtctatgtctcttattagagatttcagcttctggaataggataataattaatatctataattttattgagatttctgacaattactttgaccacatccttcagtttgagaaaatcaaatcgcccatctattacaaacatgttcaaggcaacagatgccagattacaaacggctacctcattagcatccgcatattgtattatctcagtgcaaagattactacacttgatagttcctaaattttgttgattactctttttgttacacgcatccttataaagaatgaatggagtaccagtttcaatctgagattctataatcgctttccagacgactcgagcctttattatagatttgtatctcctttctctttcgtatagtgtatacaatcgttcgaactcgtctccccaaacattgtccaatccaggacattcatccggacacatcaacgaccactctccgtcatccttcactcgtttcataaagagatcaggaatccaaagagctataaatagatctctggttctatgttcctcgtttcctgtattctttttaagatcgaggaacgccataatatcagaatgccacggttccaagtatatggccataactccaggccgtttgtttcctccctgatctatgtatctagcggtgttattataaactctcaacattggaataataccgtttgatataccattggtaccggagatatagcttccactggcacgaatattactaattgatagacctattccccctgccattttagagattaatgcgcatcgttttaacgtgtcatagataccctctatgctatcatcgatcatgttaagtagaaaacagctagacatttggtgacgactagttcccgcattaaataaggtaggagaagcgtgcgtaaaccatttttcagaaagtagattgtacgtctcaatagctgagtctatatcccattgatgaattcctactgcgacacgcattaacatgtgctgaggtctttcaacgatcttgttgtttattttcaacaagtaggatttttccaaagttttaaaaccaaaatagttgtatgaaaagtctcgttcgtaaataataaccgagttgagtttatccttatatttgttaactatatccatggtgatacttgaaataatcggagaatgtttcccatttttaggattaacatagttgaataaatcctccatcacttcactaaatagtttttttgtttccttgtgtagatttgatacggctattctggcggctagaatggcataatccggatgttgtgtagtacaagtggctgctatttcggctgccagagtgtccaattctaccgttgttactccattatatattccttgaataaccttcatagctattttaataggatctatatgatccgtgtttaagccataacataattttctaatacgagacgtgattttatcaaacatgacattttccttgtatccatttcgtttaatgacaaacatttttgttggtgtaataaaaaaattatttaacttttcattaatagggatttgacgtatgtagcgtacaaaatgatcgttcctggtatatagataaagagtcctatatatttgaaaatcgttacggctcgattaaactttaatgattgcatagtgaatatatcattaggatttaactccttgactatcatggcggcgccagaaattaccatcaaaagcattaatacagttatgccgatcgcagttaaaacggttatagcatccaccatttatatctaaaaattagatcaaagaatatgtgacaaagtcctagttgtatactgagaattgacgaaacaatgtttcttacatatttttttcttattagtaactgacttaatagtaggaactggaaagctagacttgattattctataagtatagatacccttccagataatgttctctttgataaaagttccagaaaatgtagaattttttaaaaagttatcttttgctattaccaagattgtgtttagacgcttattattaatatgagtgatgaaatccacaccgcctctagatatcgcctttatttccacattagatggtaaatccaatagtgaaactatctttttaggaatgtatggactcgcgtttagaggagtgaacgtcttgggcgtcggaaaggatgattcgtcaaacgaataaacaatttcacaaatggatgttaatgtattagtaggaaattttttgacgctagtggaattgaagattctaatggatgatgttctacctatttcatccgataacatgttaatttccgacaccaacggttttaatatttcgatgatatacggtagtctctctttcggacttatatagcttattccacaatacgagtcattatatactccaaaaaacaaaataactagtataaaatctgtatcgaatgggaaaaacgaaattatcgacataggtatagaatccggaacattgaacgtattaatacttaattctttttctgtggtaagtaccgataggttattgacattgtatggttttaaatattctataacttgagacttgatagatattagtgatgaattgaaaattatttttatcaccacgtgtgtttcaggatcatcgtcgacgcccgtcaaccaaccgaatggagtaaaataaatatcattaatatatgctctagatattagtatttttattaatcctttgattatcatcttctcgtaggcgaatgattccatgatcaagagtgatttgagaacatcctccggagtattaatgggcttagtaaacagtccatcgttgcaataataaaagttatccaagttaaaggatattatgcattcgtttaaagatatcacctcatctgacggagacaattttttggtaggttttagagactttgaagctacttgtttaacaaagttattcatcgtcgtctactattctatttaattttgtagttaatttatcacatatcacattaattgactttttggtccatttttccatacgtttatattcttttaatcctgcgttatccgtttccgttatatccagggatagatcttgcaagttaaatagaatgctcttaaataatgtcattttcttatccgctaaaaatttaaagaatgtataaacctttttcagagatttgaaactcttaggtggtgtcctagtacacaatatcataaacaaactaataaacattccacattcagattccaacagctgattaacttccacattaatacagcctattttcgctccaaatgtacattcgaaaaatctgaataaaacatcgatgtcacaatttgtattatccaatacagaatgtttgtgattcgtgttaaaaccatcggagaaggaatagaaataaaaattattatagtggtggaattcagttggaatattgcctccggagtcataaaaggatactaaacattgttttttatcataaattacacatttccaatgagacaaataacaaaatccaaacattacaaatctagaggtagaacttttaattttgtctttaagtatatacgataagatatgtttattcataaacgcgtcaaatttttcatgaatcgctaaggagtttaagaatctcatgtcaaattgtcctatataatccacttcggatccataagcaaactgagagactaagttcttaatacttcgattgctcatccaggctcctctctcaggctctattttcatcttgacgacctttggattttcaccagtatgtattcctttacgtgataaatcatcgattttcaaatccatttgtgagaagtctatcgccttagatactttttcccgtagtcgaggtttaaaaaaatacgctaacggtatactagtaggtaactcaaagacatcatatatagaatggtaacgcgtctttaactcgtcggttaactctttcttttgatcgagttcgtcgctactattgggtctgctcaggtgccccgactctactagttccaacatcataccgataggaatacaagacactttgccagcggttgtagatttatcatatttctccactacatatccgttacaatttgttaaaaatttagatacatctatattgctacataatccagctagtgaatatatatgacataataaattggtaaatcctagttctggtattttactaattactaaatctgtatatctttccatttatcatggaaaagaatttaccagatatcttcttttttccaaactgcgttaatgtattctcttacaaatattcacaagatgaattcagtaatatgagtaaaacggaacgtgatagtttctcattggccgtgtttccagttataaaacatagatggcataacgcacacgttgtaaaacataaaggaatatacaaagttagtacagaagcacgtggaaaaaaagtatctcctccatcactaggaaaacccgcacacataaacctaaccgcgaagcaatatatatacagtgaacacacaataagctttgaatgttatagttttctaaaatgtataacaaatacagaaatcaattcgttcgatgagtatatattaagaggactattagaagctggtaatagtttacagatattttccaattccgtaggtaaacgaacagatactataggtgtactagggaataagtatccatttagcaaaattccattggcctcattaactcctaaagcacaacgagagatattttcagcgtggatttctcatagacctgtagttttaactggaggaactggagtgggtaagacgtcacaggtacccaagttattgctttggtttaattatttatttggtggattctctactctagataaaatcactgactttcacgaaagaccagtcattctatctcttcctaggatagctttagttagattgcatagcaataccattttaaaatcattgggatttaaggtactagatggatctcctatttctttacggtacggatctataccggaagaattaataaacaaacaaccaaaaaaatatggaattgtattttctacccataagttatctctaacaaaactatttagttatggcactcttattatagacgaagttcatgagcatgatcaaataggagatattattatagcagtagcgagaaagcatcatacgaaaatagattctatgtttttaatgactgccacgttagaggatgacagggaacggctaaaagtatttttacctaatcccgcatttatacatattcctggagatacactgtttaaaattagcgaggtatttattcataataagataaatccatcttccagaatggcatacatagaagaagaaaagagaaatttagttactgctatacagatgtatactcctcctgatggatcatccggtatagtctttgtggcatccgttgcacagtgtcacgaatataaatcatatttagaaaaaagattaccgtatgatatgtatattattcatggtaaggtcttagatatagacgaaatattagaaaaagtgtattcatcacctaatgtatcgataattatttctactccttatttggaatccagcgttactatacgcaatgttacacacatttatgatatgggtagagtttttgtccccgctccttttggaggatcgcaacaatttatttctaaatctatgagagatcaacgaaaaggaagagtaggaagagttaatcctggtacatacgtctatttctatgatctgtcttatatgaagtctatacagcgaatagattcagaatttctacataattatatattgtacgctaataagtttaatctaacactccccgaagatttgtttataatccctacaaatttggatattctatggcgtacaaaggaatatatagactcgttcgatattagtacagaaacatggaataaattattatccaattattatatgaagatgatagagtatgctaaactttatgtactaagtcctattctcgctgaggagttggataactttgagaggacgggagaattaactagtattgtacgagaagccattttatctctaaatttacaaattaagattttaaattttaaacataaagatgatgatacgtatatacacttttgtaaaatattattcggtgtctataacggaacaaacgctactatatattatcatagacctctaacgggatatatgaatatgatttcagatactatatttgttcctgtagataataactaaaaatcaaactctaatgaccacatctttttttagagatgaaaaattttccacatctccttttgtagacacgactaaacattttgcagaaaaaagtttattagtgtttagataatcgtatacttcatcagtgtagatagtaaatgtgaacagataaaaggtattcttgctcaatagattggtaaattccatagaatatattaatcctttcttcttgagatcccacatcatttcaaccagagacgttttatccaatgatttacctcgtactataccacatacaaaactagattttgcagtgacgtcgtacctggtattcctaccaaacaaaattttacttttagttcttttagaaaattctaaggtagaatctctatttgccaatatgtcatctatggaattaccactagcaaaaaatgatagaaatatatattgatacatcgcagctggttttgatctactatactttaaaaacgaatcagattccataattgcctgtatatcatcagctgaaaaactatgttttacacgtattccttcggcatttctttttaatgatatatcttgtttagacaatgataaagttatcatgtccatgagagacgcgtctccgtatcgtataaatatttcattagatgttagacgcttcattaggggtatacttctataaggtttcttaatcagtccatcattggttgcgtcaagaactactatcggatgttgttgggtatctctagtgttacacatggccttactaaagtttgggtaaataactatgatatctctattaattatagatgcatatatttcattcgtcaaggatattagtatcgacttgctatcgtcattaatacgtgtaatgtaatcatataaatcatgcgatagccaaggaaaatttaaatagatgttcatcatataatcgtcgctataattcatattaatacgttgacattgactaatttgtaatatagcctcgccacgaagaaagctctcgtattcagtttcatcgataaaggataccgttaaatataactggttgccgatagtctcatagtctattaagtggtaagtttcgtacaaatacagaatccctaaaatattatctaatgttggattaatctttaccataactgtataaaatggagacggagtcataactattttaccgtttgtacttactggaatagatgaaggaataatctccggacatgctggtaaagacccaaatgtctgtttgaagaaatccaatgttccaggtcctaatctcttaacaaaaattacgatattcgatcccgatatcctttgcattctatttaccagcatatcacgaactatattaagattatctatcatgtctattctcccaccgttatataaatcgcctccgctaagaaacgttagtatatccatacaatggaatacttcatttctaaaatagtattcgttttctaattctttaatgtgaaatcgtatactagaaagggaaaaattatctttgagttttccgttagaaaagaaccacgaaactaatgttctgattgcgtccgattccgttgctgaattaatggatttacaccaaaaactcatataacttctagatgtagaagcattcgctaaaaaattagtagaatcaaaggatataagtagatgttccaacaagtgagcaattcccaagatttcatctatatcattctcgaatccgaaattagaaattcccaagtagatatcctttttcatccgatcgttgatgaaaatacgaactttattcggtaagacaatcatttactaaggagtaaaataggaagtaatgttcgtatgtcgttatcatcgtataaattaaaggtgtgttttttaccattaagtgacattataattttaccaatattggaattataatataggtgtatttgcgcactcgcgacggttgatgcatcggtaaatatagctgtatctaatgttctagtcggtatttcatcatttcgctgtctaataatagcgttttctctatctgtttccattacagctgcctgaagtttattggtcggataatatgtaaaataataagaaatacatacgaataacaaaaataaaataagatataataaagatgccatttagagatctaattttgtttaacttgtccaaattcctacttacagaagatgaggaatcgttggagatagtgtcttccttatgtagaggatttgaaatatcttataatgacttgataacttactttccagataggaaataccataaatatatttataaagtatttgaacatgtagatttatcggaggaattaagtatggaattccatgatacaactctgagagatttagtctatcttagattgtacaagtattccaagtgtatacggccgtgttataaattaggagataatctaaaaggcatagttgttataaaggacaggaatatttatattagggaagcaaatgatgacttgatagaatatctcctcaaggaatacactcctcagatttatacatattctaatgagcgcgtccccataactggttcaaaattaattctttgtggattttctcaagttacatttatggcgtatacaacgtcgcatataacaacaaataaaaaggtagatgttctcgtttccaaaaaatgtatagatgaactagtcgatccaataaattatcaaatacttcaaaatttatttgataaaggaagcggaacaataaacaaaatactcaggaagatattttattcggtaacaggtggccaaactccataggtagctttttctatttcggattttagaatttccaaattcaccagcgatttatcggttttggtgaaatccaaggatttattaatgtccacaaatgccatttgttttgtctgtggattgtatttgaaaatggaaacgatgtagttagatagatgcgctgcgaagtttcctattagggttccgcgcttcacgtcacccagcatacttgaatcaccatcctttaaaaaaaatgataagatatcaacatggagtatatcatactcggattttaattcttctactgcatcactgacattttcacaaatactacaatacggtttaccgaaaataatcagtacgttcttcatttatgggtatcaaaaacttaaaatcgttactgctggaaaataaatcactgacgatattagatgataatttatacaaagtatacaatggaatatttgtggatacaatgagtatttatatagccgtcgccaattgtgtcagaaacttagaagagttaactacggtattcataaaatacgtaaacggatgggtaaaaaagggagggcatgtaaccctttttatcgatagaggaagtataaaaattaaacaagacgttagagacaagagacgtaaatattctaaattaaccaaggacagaaaaatgttagaattagaaaagtgtacatccgaaatacaaaatgttaccggatttatggaagaagaaataaaggcagaaatgcaattaaaaatcgataaactcacatttcaaatatatttatctgattctgataacataaaaatatcattgaatgagatactaacacatttcaacaataatgagaatgttacattattttattgtgatgaacgagacgcagaattcgttatgtgtctcgaggctaaaacacatttctctaccacaggagaatggccgttgataataagtaccgatcaggatactatgctatttgcatctgctgataatcatcctaagatgataaaaaacttaactcaactgtttaaatttgttccctcggcagaggataactatttagcaaaattaacggcgttagtgaatggatgtgatttctttcctggactctatggggcatctataacacccaccaacttaaacaaaatacaattgtttagtgattttacaatcgataatatagtcactagtttggcaattaaaaattattatagaaagactaactctaccgtagacgtgcgtaatattgttacgtttataaacgattacgctaatttagacgatgtctactcgtatattcctccttgtcaatgcactgttcaagaatttatattttccgcattagatgaaaaatggaatgaatttaaatcatcttatttagaaagcgtgccgttaccctgccaattaatgtacgcgttagaaccacgcaaggagattgatgtttcagaagttaaaactttatcatcttatatagatttcgaaaatactaaatcagatatcgatgttataaaatctatatcctcgatcttcggatattctaacgaaaactgtaacacgatagtattcggcatctataaggataatttactactgagtataaataattcattttactttaacgatagtctgttaataaccaatactaaaagtgataatataataaatataggttactagattaaaaatggtgttccaactcgtgtgctctacatgcggtaaagatatttctcacgaacgatataaattgattatacgaaaaaaatcattaaaggatgtactcgtcagtgtaaagaacgaatgttgtaggttaaaattatctacacaaatagaacctcaacgtaacttaacagtgcaacctctattggatataaactaatatggatccggttaattttatcaagacatatgcgcctagaggttctattatttttattaattataccatgtcattaacaagtcatttgaatccatcgatagaaaaacatgtgggtatttattatggtacgttattatcggaacacttggtagttgaatctacctatagaaaaggagttcgaatagtcccattggatagtttttttgaaggatatcttagtgcaaaagtatacatgttagagaatattcaagttatgaaaatagcagctgatacgtcattaactttattgggtattccgtatggatttggtcataatagaatgtattgttttaaattggtagctgactgttataaaaatgccggtattgatacatcgtctaaacgaatattgggcaaagatatttttctgagccaaaacttcacagacgataatagatggataaagatatatgattctaataatttaacattttggcaaattgattaccttaaagggtgagttaatatgcataactactcctccgttgttttttccctcgttctttttcttaacgttgtttgccatcactctcataatgtaaagatattctaaaatggtaaacttttgcatatcggacgcagaaattggtataaatgttgtaattgtattatttcccgtcaatggactagtcacagctccatcagttttatatcctttagagtatttctcactcgtgtctaacattctagagcattccatgatctgtttatcgttgatattggccggaaagatagattttttattttttattatattactattggcaattgtagatataacttctggtaaatatttttctaccttttcaatctcttctattttcaagccggctatatattctgctatattgttgctagtatcaataccttttctggctaagaagtcatatgtggtattcactatatcagttttaactggtagttccattagcctttccacttctgcagaataatcagaaattggttctttaccagaaaatccagctactataataggctcaccgatgatcattggcaaaatcctatattgtaccagattaatgagagcatatttcatttccaataattctgctagttcttgagacattgatttatttgatgaatctagttggttctctagatactctaccatttctgccgcatacaataacttgttagataaaatcagggttatcaaagtgtttagcgtggctagaatagtgggcttgcatgtattaaagaatgcggtagtatgagtaaaccgttttaacgaattatatagtctccagaaatctgtggcgttacatacatgagccgaatgacatcgaagattgtccaatatttttaatagctgctctttgtccattatttctatatttgactcgcaacaattgtagataccattaatcaccgattcctttttcgatgccggacaatagcacaattgtttagctttggactctatgtattcagaattaatagatatatctctcaatacagattgcactatacattttgaaactatgtcaaaaattgtagaacgacgctgttctgcagccatttaactttaaataatttacaaaaatttaaaatgagcatccgtataaaaatcgataaactgcgccaaattgtggcatatttttcagagttcagtgaagaagtatctataaatgtagactcgacggatgagttaatgtatatttttgccgccttgggcggatctgtaaacatttgggccattatacctctcagtgcatcagtgttttaccgaggagccgaaaatattgtgtttaatcttcctgtgtccaaggtaaaatcgtgtttgtgtagttttcacaatgatgccatcatagatatagaacctgatctggaaaataatctagtaaaactttctagttatcatgtagtaagtgtcgattgtaacaaggaactgatgcctattaggacagatactactatttgtctaagtatagatcaaaagaaatcttacgtgtttaattttcacaagtatgaagaaaaatgttgtggtagaaccgtcattcattaagtgacattataattttaccaatattggaattataatataggtgtatttgcgcacttgcgacggttgatgcatcggtaaatatagctgtatctaatgttctagtcggtatttcatcatttcgctgtctaataatagcgttttctctatctgtttccattacagctgcctgaagtttattggtcggataatatgtaaaataataagaaatacatacgaataacaaaaataaaataagatataataaagatgccatttagagatctaattttgtttaacttgtccaaattcctacttacagaagatgaggaatcgttggagatagtgtcttccttatgtagaggatttgaaatatcttataatgacttgataacttactttccagataggaaataccataaatatatttataaagtatttgaacatgtagatttatcggaggaattaagtatggaattccatgatacaactctgagagatttagtctatcttagattgtacaagtattccaagtgtatacggccgtgttataaattaggagataatctaaaaggcatagttgttataaaggacaggaatatttatattagggaagcaaatgatgacttgatagaatatctcctcaaggaatacactcctcagatttatacatattctaatgagcgcgtccccataactggttcaaaattaattctttgtggattttctcaagttacatttatggcgtatacaacgtcgcatataacaacaaataaaaaggtagatgttctcgtttccaaaaaatgtatagatgaactagtcgatccaataaattatcaaatacttcaaaatttatttgataaaggaagcggaacaataaacaaaatactcaggaagatattttattcggtaacaggtggccaaactccataggtagctttttctatttcggattttagaatttccaaattcaccagcgatttatcggttttggtgaaatccaaggatttattaatgtccacaaatgccatttgttttgtctgtggattgtatttgaaaatggaaacgatgtagttagatagatgcgctgcgaagtttcctattagggttccgcgcttcacgtcacccagcatacttgaatcaccatcctttaaaaaaaatgataagatatcaacatggagtatatcatactcggattttaattcttctactgcatcactgacattttcacaaatactacaatacggtttaccgaaaataatcagtacgttcttcatttatgggtatcaaaaacttaaaatcgttactgctggaaaataaatcactgacgatattagatgataatttatacaaagtatacaatggaatatttgtggatacaatgagtatttatatagccgtcgccaattgtgtcagaaacttagaagagttaactacggtattcataaaatacgtaaacggatgggtaaaaaagggagggcatgtaaccctttttatcgatagaggaagtataaaaattaaacaagacgttagagacaagagacgtaaatattctaaattaaccaaggacagaaaaatgctagaattagaaaagtgtacatccgaaatacaaaatgttaccggatttatggaagaagaaataaaggcagaaatgcaattaaaaatcgataaactcacatttcaaatatatttatctgattctgataacataaaaatatcattgaatgagatactaacacatttcaacaataatgagaatgttacattattttattgtgatgaacgagacgcagaattcgttatgtgtctcgaggctaaaacacatttctctaccacaggagaatggccgttgataataagtaccgatcaggatactatgctatttgcatctgctgataatcatcctaagatgataaaaaacttaactcaactgtttaaatatgttccatctgcagaggataactatttagcaaaattaacggcgttagtgaatggatgtgatttctttcctggactctatggggcatctataacacccaccaacttaaacaaaatacaattgtttagtgattttacaatcgataatatagtcactagtttggcaattaaaaattattatagaaagactaactctaccgtagacgtgcgtaatattgttacgtttataaacgattacgctaatttagacgatgtctactcgtatgttcctccttgtcaatgcactgttcaagaatttatattttccgcattagatgaaaaatggaatgaatttaaatcatcttatttagagaccgtgccgttaccctgtcaattaatgtacgcgttagaaccacgtaaggagattgatgtttcagaagttaaaactttatcatcttatatagatttcgaaaatactaaatcagatatcgatgttataaaatctatatcctcgatcttcggatattctaacgaaaactgtaacacgatagtattcggcatctataaggataatttactactgagtataaataattcattttactttaacgatagtctgttaataaccaatactaaaagtgataatataataaatataggttactagattaaaaatggtgttccaactcgtgtgctctacatgcggtaaagatatttctcacgaacgatataaattgattatacgaaaaaaatcattaaaggatgtactcgtcagtgtaaagaacgaatgttgtaggttaaaattatctacacaaatagaacctcaacgtaacttaacagtgcaacctctattggatataaactaatatggatccggttaattttatcaagacatatgcgcctagaggttctattatttttattaattataccatgtcattaacaagtcatttgaatccatcgatagaaaaacatgtgggtatttattatggtacgttattatcggaacacttggtagttgaatctacctatagaaaaggagttcgaatagtcccattggatagtttttttgaaggatatcttagtgcaaaagtatacatgttagagaatattcaagttatgaaaatagcagctgatacgtcattaactttattgggtattccgtatggatttggtcataatagaatgtattgttttaaattggtagctgactgttataaaaatgccggtattgatacatcgtctaaacgaatattgggcaaagatatttttctgagccaaaacttcacagacgataatagatggataaagatatatgattctaataatttaacattttggcaaattgattaccttaaagggtgagttaatatgcataactactcctccgttgttttttccctcgttctttttcttaacgttgtttgccatcactctcataatgtaaagatattctaaaatggtaaacttttgcatatcggacgcagaaattggtataaatgttgtaattgtattatttccatattattatgaagactcctggtaatactgatggcgttttccagggaatattctatgactgaatgttctcaagaactacaaaagttttctttcaaaatagctatctcgtctctcaacaaactacgaggattcaaaaagagagtcaatgtttttgaaactagaatcgtaatggataatgacgataacattttaggaatgttgttttcggatagagttcaatcctttaagatcaacatctttatggcgtttttagattaatactttcaatgagataaatatgggtggcggagtaagtgttgagctccctaaacgggatccgcacccgggagtacccactgatgagatgttattaaacgtggataaaatgcatgacgtgatagctcccgctaagcttttagaatatgtgcatataggaccactagcaaaagataaagaggataaagtaaagaaaagatatccagagtttagattagtcaacacaggacccggtggtctttcggcattgttaagacaatcgtataatggaaccgcacccaattgctgtcgcacttttaatcgtactcattattggaagaaggatggaaagatatcagataagtatgaagagggtgcagtattagaatcgtgttggccagacgttcacgacactggaaaatgcgatgttgatttattcgactggtgtcagggggatacgttcgatagaaacatatgccatcagtggatcggttcagcctttaataggagtaatagaactgtagagggtcaacaatcgttaataaatctgtataataagatgcaaacattatgtagtaaagatgctagtgtaccaatatgcgaatcatttttgcattatttacgcgcacacaatacagaagatagcaaagagatgatcgattatattctaagacaacagtctgcggactttaaacagaaatatatgagatgtagttatcccactagagataagttagaagagtcattaaaatatgcggaacctcgagaatgttgggatccagagtgttcgaatgccaatgttaatttcttactaacacgtaattataataatttaggactttgcaatattgtacgatgtaataccagcgtgaacaacttacagatggataaaacttcctcattaagattgtcatgtggattaagcaatagtgatagattttctactgttcccgtcaatagagcaaaagtagttcaacataatattaaacactcgttcgacctaaaattgcatttgatcagtttattatctctcttggtaatatggatactaattgtagctatttaaatgggtgccgcggcaagcatacagacgacggtgaatacactcagcgaacgtatctcgtctaaattagaacaagaagcgaacgctagtgctcaaacaaaatgtgatatagaaatcggaaatttttatatccgacaaaaccatggatgtaacctcactgttaaaaatatgtgctctgcggacgcggatgctcagttggatgctgtgttatcagccgctacagaaacatatagtggattaacaccggaacaaaaagcatacgtgccagctatgtttactgctgcgttaaacattcagacgagtgtaaacactgttgttagagattttgaaaattatgtgaaacagacttgtaattctagcgcggtcgtcgataacaaattaaagatacaaaacgtaatcatagatgaatgttacggagccccaggatctccaacaaatttggaatttattaatacaggatctagcaaaggaaattgtgccattaaagcgttgatgcaattgacgactaaggccactactcaaatagcacctagacaagttgctggtacaggagttcagttttatatgattgttatcggtgttataatattggcagcgttgtttatgtactatgccaagcgtatgttgttcacatccaccaatgataaaatcaaacttattttagccaataaggaaaacgtccattggactacttacatggacacattctttagaacttctccgatggttattgctaccacggatatgcaaaactgaaaatatattgataatattttaatagattaacatggaagttatcgctgatcgtctagacgatatagtgaaacaaaatatagcggatgaaaaatttgtagattttgttatacacggtctagagcatcaatgtcctgctatacttcgaccattaattaggttgtttattgatatactattatttgttatagtaatttatatttttacggtacgtctagtaagtagaaattatcaaatgttgttggtggtgctagtcatcacattaactattttttattactttatactataatagtactagactgacttctaacaaacatctcacctgccataaataaatgcttgatattaaagtcttctatttctaacactattccatctgtggaaaataatactctgacattatcgctaattgacacatcggtgagtgatatgcctataaagtaataatcttctttgggcacatataccagtgtaccaggttctaacaacctatttactggtgctcctgtagcatactttttctttaccttgagaatatccatcgtttgcttggtcaatagcgatatgtgattttttatcaaccactcaaaaaagtaattggagtgttcatatcctctacgggctattgtctcatggccgtgtatgaaatttaagtaacacgactgtggtagatttgttctatagagccgattgccgcaaatagatagaactaccaatatgtctgtacaaatgttaaacattaattgattaacagaaaaaacaatgttcgttctgggaatagaaaccagatcaaaacaaaattcgttagaatatatgccacgtttatacatggaatataaaataactacagtttgaaaaataacagtatcatttaaacatttaacttgcggggttaatctcacaactttactgtttttgaactgttcaaaatatagcatcgatccgtgagaaatacgtttagccgcctttaatagaggaaatcccaccgcctttctggatctcaccaacgacgatagttctgaccagcaactcatttcttcatcatccacctgttttaacatataataggcaggagatagatatccgtcattgcaatattccttctcgtaggcacacaatctaatattgataaaatctccattctcttctctgcatttattatcttgtctcggtggctgattaggctgtggtcttggtttaggccttggtctatcgttgttgaatctattttggtcattaaatctttcatttcttcctggtatatttctatcacctcgtttggttggatttttgtctatattatcgtttgtaacatcggtacgggtattcatttatcacaaaaaaaacttctctaaatgagtctactgctagaaaacctcatcgaagaagataccatattttttgcaggaagtatatctgagtatgatgatttacaaatggttattgccggcgcaaaatccaaatttccaagatctatgctttctatttttaatatagtacctagaacgatgtcaaaatatgagttggagttgattcataacgaaaatatcacaggagcaatgtttaccacaatgtataatataagaaacaatttgggtctaggagatgataaactaactattgaagccattgaaaactatttcttggatcctaacaatgaagttatgcctcttattattaataatacggatatgactgccgtcattcctaaaaaaagtggtaggagaaagaataagaacatggttatcttccgtcaaggatcatcacctatcttgtgcattttcgaaactcgtaaaaagattaatatttataaagaaaatatggaatccgcgtcgactgagtatacacctatcggagacaacaaggctttgatatctaaatatgcgggaattaatgtcctgaatgtgtattctccttccacatccataagattgaatgccatttacggattcaccaataaaaataaactagagaaacttagtactaataaggaactagaatcgtatagttctagccctcttcaagaacccattaggttaaatgattttctgggactattggaatgtgttaaaaagaatattcctctaacagatattccgacaaaggattgattactataaatggagaatgttcctaatgtatactttaatcctgtgtttatagagcccacgtttaaacattctttattaagtgtttataaacacagattaatagttttatttgaagtattcgttgtattcattctaatatatgtattttttagatctgaattaaatatgttcttcatgcctaaacgaaaaatacccgatcctattgatagattacgacgtgctaatctagcgtgtgaagacgataaattaatgatctatggattaccatggatgacaactcaaacatctgcgttatcaataaatagtaaaccgatagtgtataaagattgtgcaaagcttttgcgatcaataaatggatcacaaccagtatctcttaacgatgttcttcgcagatgatgattcattttttaagtatttggctagtcaagatgatgaatcttcattatctgatatattgcaaatcactcaatatctagactttctgttattattattgatccaatcaaaaaataaattagaagctgtgggtcattgttatgaatctctttcagaggaatacagacaattgacaaaattcacagactttcaagattttaaaaaactgtttaacaaggtccctattgttacagatggaagggtcaaacttaataaaggatatttgttcgactttgtgattagtttgatgcgattcaaaaaagaatcctctctagctaccaccgcaatagatcctgttagatacatagatcctcgtcgtgatatcgcattttctaacgtgatggatatattaaagtcgaataaagtgaacaataattaattctttattgtcatcatgaacggcggacatattcagttgataatcggccccatgttttcaggtaaaagtacagaattaattagacgagttagacgttatcaaatagctcaatataaatgcgtgactataaaatattctaacgataatagatacggaacgggactatggacgcatgataagaataattttgaagcattggaagcaactaaactatgtgatgtcttggaatcaattacagatttctccgtgataggtatcgatgaaggacagttctttccagacattgtttaattctgtgagcgtatggcaaacgaaggaaaaatagttatagtagccgcactcgatgggacatttcaacgtaaaccgtttaataatattttgaatcttattccattatctgaaatggtggtaaaactaactgctgtgtgtatgaaatgctttaaggaggcttccttttctaaacgattgggtgaggaaaccgagatagagataataggaggtaatgatatgtatcaatcggtgtgtagaaagtgttacgtcggctcataatattatattttttatctaaaaaactaaaaataaacattgattaaattttaatataatacttaaaaatggatgttgtgtcgttagataaaccgtttatgtattttgaggaaattgataatgagttagattacgaaccagaaagtgcaaatgaggtcgcaaaaaaactgccgtatcaaggacagttaaaactattactaggagaattattttttcttagtaagttacagcgacacggtatattagatggtgccaccgtagtgtatataggatcggctcctggtacacatatacgttatttgagagatcatttctataatttaggagtgatcatcaaatggatgctaattgacggccgccatcatgatcctattttaaatggattgcgtgatgtaactctagtgactcggttcgttgatgaggaatatctacgatccatcaaaaaacaactgcatccttctaagattattttaatttctgatgtaagatccaaacgaggaggaaatgaacctagtacggcggatttactaagtaattacgctctacaaaatgtcatgattagtattttaaaccccgtggcatctagtcttaaatggagatgcccgtttccagatcaatggatcaaggacttttatatcccacacggtaataaaatgttacaaccttttgctccttcatattcagctgaaatgagattattaagtatttataccggtgagaacatgagactgactcgagttaccaaattagacgctgtaaattatgaaaaaaagatgtactaccttaataagatcgtccgtaacaaagtagttgttaactttgattatcctaatcaggaatatgactattttcacatgtactttatgctgaggaccgtgtactgcaataaaacatttcctactactaaagcaaaggtactatttctacaacaatctatatttcgtttcttaaatattccaacaacatcaactgaaaaagttagtcatgaaccaatacaacgtaaaatatctagcaaaaattctatgtctaaaaacagaaatagcaagagatccgtacgcggtaataaatagaaacgtactactgagatatactaccgatatagagtataatgatttagttactttaataaccgttagacataaaattgattctatgaaaactgtgtttcaggtatttaacgaatcatccataaattatactccggttgatgatgattatggagaaccaatcattataacatcgtatcttcaaaaaggtcataacaagtttcctgtaaattttctatacatagatgtggtaatatctgacttatttcctagctttgttagactagatactacagaaactaatatagttaatagtgtactacaaacaggcgatggtaaaaagactcttcgtcttcccaaaatgttagagacggaaatagttgtcaagattctctatcgccctaatataccattaaaaattgttagatttttccgcaataacatggtaactggagtagagatagccgatagatctgttatttcagtcgctgattaatcaattagtagagatgagataagaacattataataatcaataatatatcttatatcttatatcttatatcttatatcttgtttagaaaaatgctaatattaaaatagctaacgctagtaatccaatcggaagccatttgatatctataatagggtatctaatttcctgatttaaatagcggacagctatattctcggtagctactcgtttggaatcacaaacattatttacatctaatttactatctgtaatggaaacgtttcccaatgaaatggtacaatccgatacattgcattttgttatatttttttttaaagaggctggtaacaacgcatcgcttcgtttacatggctcgtaccaacaataatagggtaatcttgtatctattcctatccgtactatgcttttatcaggataaatacatttacatcgtatatcgtctttgttagcatcacagaatgcataaatttgttcgtccgtcatgataaaaatttaaagtgtaaatataactattatttttatagttgtaataaaaagggaaatttgattgtatactttcggttctttaaaagaaactgacttgataaaaatggctgtaatctctaaggttacgtatagtctatatgatcaaaaagagattaatgctacagatattatcattagtcatgttaaaaatgacgacgatatcggtaccgttaaagatggtagactaggtgctatggatggggcattatgtaagacttgtgggaaaacggaattggaatgtttcggtcactggggtaaagtaagtatttataaaactcatatagttaagcctgaatttatttcagaaattattcgtttactgaatcatatatgtattcactgcggattattgcgttcacgagaaccgtattccgacgatattaacctaaaagagttatcgggacacgctcttaggagattaaaggataaaatattatccaagaaaaagtcatgttggaacagtgaatgtatgcaaccgtatcaaaaaattactttttcaaagaaaaaggtttgtttcgtcaacaagttggatgatattaacgttcctaattctctcatctatcaaaagttaatttctattcatgaaaagttttggccattattagaaattcatcaatatccagctaacttattttatacagactactttcccatccctccgttgattattagaccggctattagtttttggatagatagtatacccaaagagaccaatgaattaacttacttattaggtatgatcgttaagaattgtaacttgaatgctgatgaacaggttatccagaaggcggtaatagaatacgatgatattaaaattatttctaataacactaccagtatcaatttatcatatattacatccggcaaaaataatatgattagaagttatatcgtcgcccgacgaaaagatcagaccgctagatctgtaattggtcccagtacatctatcaccgttaatgaggtaggaatgcccgcatatattagaaatacacttacagaaaagatatttgttaatgcctttacagtggataaagttaaacaactattagcgtcaaaccaagttaaattttactttaataaacgattaaaccaattaacaagaatacgccaaggaaagtttattaaaaataaaatacatttattgcctggtgattgggtagaagtagctgttcaagaatatacaagtattatttttggaagacagccgtctctacatagatacaacgtcatcgcttcatctatcagagctaccgaaggagatactatcaaaatatctcccggaattgccaactctcaaaatgctgatttcgacggggatgaggaatggatgatattagaacaaaatcctaaagctgtaattgaacaaagtattcttatgtatccgacgacgttactcaaacacgatattcatggagcccccgtttatggatctattcaagatgaaatcgtagcagcgtattcattgtttaggatacaagatctttgtttagatgaagtattgaacatcttggggaaatatggaagagagttcgatcctaaaggtaaatgtaaattcagcggtaaagatatctatacttacttgataggtgaaaagattaattatccgggtctcttaaaggatggtgaaattattgcaaacgacgtagatagtaattttgttgtggctatgaggcatctgtcattggctggactcttatccgatcataagtcgaacgtggaaggtatcaactttattatcaagtcatcttatgtttttaagagatatctatctatttacggttttggggtgacattcaaagatctgagaccaaattcgacgttcactaataaattggaggccatcaacgtagaaaaaatagaacttatcaaagaagcatacgccaaatatctcaacgatgtaagagacgggaaaatagttccattatctaaagctttagaggcggactatgtggaatccatgttatccaacttgacaaatcttaatatccgagagatagaagaacatatgagacaaacgctgatagatgatccagataataacctcctgaaaatggccaaagcgggttataaagtaaatcccacagaactaatgtatattctaggtacgtatggacaacaaaggattgatggtgaaccagcagagactcgagtattgggtagagttttaccttactatcttccagactctaaggatccagaaggaagaggttatattcttaattctttaacaaaaggattaacgggttctcaatattacttttcgatgctggttgcaagatctcaatctactgatatcgtctgtgaaacatcacgtaccggaacactggctagaaaaatcattaaaaagatggaggatatggtggtcgacggatacggacaagtagttataggtaatacgctcatcaagtacgccgccaattataccaaaattctaggctcagtatgtaaacctgtagatcttatctatccagatgagtccatgacttggtatttggaaattagtgctctgtggaataaaataaaacagggattcgtttactctcagaaacagaaacttgcaaagaagacattggcgccgtttaatttcctagtattcgtcaaacccaccactgaggataatgctattaaggttaaggatctgtacgatatgattcataacgtcattgatgatgtgagagagaaatacttctttacggtatctaatatagattttatggagtatatattcttgacgcatcttaatccttctagaattagaattacaaaagaaacggctatcactatctttgaaaagttctatgaaaaactcaattatactctaggtggtggaactcctattggaattatttctgcacaggtattgtctgagaagtttacacaacaagccctgtccagttttcacactactgaaaaaagtggtgccgtcaaacaaaaacttggtttcaacgagtttaataacttgactaatttgagtaagaataagaccgaaattatcactctggtatccgatgatatctctaaacttcaatctgttaagattaatttcgaatttgtatgtttgggagaattaaatccaaacatcactcttcgaaaagaaacagataggtatgtagtagatataatagtcaatagattatacatcaagagagcagaaataaccgaattagtcgtcgaatatatgattgaacgattcatctcctttagcgtcattgtaaaggaatggggtatggagacattcattgaggacgaggataatattagatttactgtctacctaaatttcgttgaaccggaagaattgaatcttagtaagtttatgatggttcttccgggggcagccaacaagggaaagattagtaaattcaagattcctatctctgactatacgggatatgacgacttcaatcaaacaaaaaagctcaataagatgactgtagaactcatgaatctaaaagaattgggttctttcgatttggaaaacgtcaacgtgtatcctggagtatggaatacatacgatatcttcggtatcgaggccgctcgtgaatacttgtgcgaagccatgttaaacacctatggagaagggttcgattatctgtatcagccttgtgatcttctcgctagtttactatgtgctagttacgaaccagaatcagtgaataaattcaagttcggcgcagctagtactcttaagagagctacgttcggagacaataaagcattgttaaacgcggctcttcataaaaagtcagaacctattaacgataatagtagctgccacttttttagcaaggtccctaatataggaactggatattacaaatactttatcgacttgggtcttctcatgagaatggaaaggaaactatctgataagatatcttctcaaaagatcaaggaaatggaagaaacagaagacttttaattcttatcaataacatatttttctatgatctgtcttttaaacgatggattttccacaaatgcgcctctcaagtccctcatagaatgatacacgtataaaaaatatagcataggcaatgactccttatttttagacattagatatgccaaaatcatagccccgcttctatttactcccgcagcacaatgaaccaacacgggctcgtttcgttgatcacatttagataaaaaggcggttacgtcgtcaaaatatttactaatatcggtagttgtatcatctaccaacggtatatgaataatattaatattagagttaggtaatgtatatttatccatcgtcaaatttaaaacatatttgaacttaacttcagatgatggtgcatccatagcatttttataatttcccaaatacacattattggttacccttgtcattatagtgggagatttggctctgtgcatatctccagttgaacgtagtagtaagtatttatacaaacttttcttatccatttataacgtacaaatggataaaactactttatcggtaaacgcgtgtaatttagaatacgttagagaaaaggctatagtaggcgtacaagcagccaaaacatcaacacttatattctttgttattatattggcaattagtgcgctattactctggtttcagacgtctgataatccagtctttaatgaattaacgagatatatgcgaattaaaaatacggttaacgattggaaatcattaacggatagcaaaacaaaattagaaagtgatagaggtagacttctagccgctggtaaggatgatatattcgacttcaaatgtgtggatttcggcgcctattttatagctatgcgattggataagaaaacatatctgccgcaagctattaggcgaggtactggagacgcgtggatggttaaaaaggcggcaaaggtcgatccatctgctcaacaattttgtcagtatttgataaaacacaagtctaataatgttattacttgtggtaatgagatgttaaatgaattaggttatagcggttattttatgtcaccgcattggtgttccgattttagtaatatggaatagtgttagataaatgcggtaacgaatgttcctgtaaggaaccataacagcttagatttaacgttaaagatgagcataaacataataaacaaaattacaatcaaacttataacattaatatcaaacaatccaaaaaatgaaatcagtggagtagtaaacgcgtacataactcctggataacgtttagcagctgccgttcctattctagaccaaaaattcggtttcatgttttcgaaacggtattctgcaacaagtcgaggatcgtgttctacatatttggcggcattatccagtatctgcctattgatcttcatttcgttttcaattctggctatttcaaaataaaatcccgatgatagacctccagactttataatttcatctacgatgttcagcgccgtagtaactctaataatataggctgataagctaacatcataccctcctgtatatgtgaatatggcatgatttttgtccattacaagctcggttttaactttattgcctgtaataatttctctcatctgtaggatatctatttttttgtcatgcattgccttcaagacgggacgaagaaacgtaatatcctcaataacgttatcgttttctacaataactacatattctacctttttattttctaactcggtaaaaaaattagaatcccatagggctaaatgtctagcgatatttcttttcgtttcctctgtacacatagtgttacaaaaccctgaaaagaagtgagtatacttgtcatcatttctaatgtttcctccagtccactgtataaacgcataatccttgtaatgatctggatcatccttgactaccacaacatttcttttttctggcataacttcgttgtcctttacatcatcgaacttctgatcattaatatgctcatgaacattaggaaatgtttctgatggaggtctatcaataactggcacaacaataacaggagttttcaccgccgccatttagttattgaaattaatcatatacaactctttaatacgagttatattttcgtctatccattgtttcacattgacatatttcgacaaaaagatataaaatgcgtattccaatgcttctctgtttaatgaattactaaaatatacaaacacgtcactgtctggcaataaatgatatcttagaatattgtaacaatgtaaggaaccataacagtttagatttaacgttaaagatgagcataaacataataaacaaaattacaatcaaacctataacattaatatcaaacaatccaaaaaatgaaatcagtggagtagtaaacgcgtacataactcctggataacgtttagcagctgccgttcctattctagaccaaaaatttggtttcatgttttcgaaacggtattctgcaacaagtcggggatcgtgttctacatatttggcggcattatccagtatctgcctattgatcttcatttcgttttcgattctggctatttcaaaataaaatcccgatgatagacctccagactttataatttcatctacgatgttcagcgccgtagtaactctaataatataggctgataagctaacatcataccctcctgtatatgtgaatatggcatgatttttgtccattacaagctcggttttaactttattgcctgtaataatttctctcatctgtaggatatctatttttttgtcatgcattgccttcaagacgggacgaagaaacgtaatatcctcaataacgttatcgttttctacaataactacatattctacctttttattttctaactcggtaaaaaaattagaatcccatagggctaaatgtctagcgatatttcttttcgtttcctctgtacacatagtgttacaaaaccctgaaaagaagtgagtatacttgtcatcatttctaatgtttcctccagtccactgtataaacgcataatccttgtaatgatctggatcatccttgactaccacaacatttcttttttctggcataacttcgttgtcctttacatcatcgaacttctgatcattaatatgctcatgaacattaggaaatgtttctgatggaggtctatcaataactggcacaacaataacaggagttttcaccgccgccatttagttattgaaattaatcatatacaactctttaatacgagttatattttcgtctatccattgtttcacatttacatatttcgacaaaaagatataaaatgcgtattccaatgcttctctgtttaatgaattactaaaatatacaaacacgtcactgtctggcaataaatgatatcttagaatattgtaacaatttattttgtattgcacatgttcgtgatctatgagttcttcttcgaatggcataggatctccgaatctgaaaacgtataaataggagttagaataataatatttgagagtattggtaatatataaactctttagcggtataattagtttttttctctcaatttctatttttagatgtgatggaaaaatgactaattttgtagcattagtatcatgaactctaatcaaaatcttaatatcttcgtcacacgttagctctttgaagtttttaagagatgcatcagttggttctacagatggagtaggtgcaacaattttttgttctacacatgtatgtactggagccattgttttaactataatggtgcttgtatcgaaaaactttaatgcagatagcggaagctcttcgccgcgactttctacgtcgtaattgggttctaacgccgatctctgaatggatactagttttctaagttctaatgtgattctctgaaaatgtaaatccaattcctccggcattatagatgtgtatacatcggtaaataaaactatagtatccaacgatcccttctcgcaaattctagtcttaaccaaaaaatcgtatataaccacggagatggcgtatttaagagtggattcttctaccgttttgttcttggatgtcatataggaaactataaagtccgcactactgttaagaatgattactaacgcaactatatagtttaaattaagcattttggaaacataaaataactctgtagacgatacttgactttcgaataagtttgcagacaaacgaagaaagaacagacctctcttaatttcagaagaaaactttttttcgtattcctgacgtctagagtttatatcaataagaaagttaagaattagtcggttaatgttgtatttcattacccaagtttgagatttcataatattatcaaaagacatgataatattaaagataaagcgctgactatgaacgaaatagctatatggttcgctcaagaatatagtcttgttaaacgtggaaacgataactgtatttttaatcacgtcagcggcatctaaattaaatataggtatatttattccacacactctacaatatgccacaccatcttcataataaataaattcgttagcaaaattattaattttagtgaaatagttagcgtcaactttcatagcttccttcaatctaatttgatgctcacacggtgcgaattccactctaacatcccttttccatgcctcaggttcatcgatctctataatatctagttttttgcgtttcacaaacacaggctcgtctctcgcgatgagatctgtatagtaactatgtaaatgataactagatagaaagatgtagctatatagatgacgatcctttaagagaggtataataactttaccccaatcagatagactgttgttatggtcttcggaaaaagaatttttataaatttttccagtattttccaaatatacgtacttaacatctaaaaaatccttaatgataataggaatggataatccgtctattttataaagaaatacatatcgcacattatacttttttttggaaatgggaataccgatgtgtctacataaatatgcaaagtctaaatattttttagagaatcttagttggtccaaattcttttccaagtacggtaatagatttttcatattgaacggtatcttcttaatctctggttctagttccgcattaaatgatgaaactaagtcactatttttataactaacgattacatcacctctaacatcatcatttaccagaatactgatcttcttttgtcgtaaatacatgtctaatgtgttaaaaaaaagatcatacaagttatacgtcatttcatctgtggtattcttgtcattgaaggataaactcgtactaatctcttctttaacagcctgttcaaatttatatcctatatacgaaaaaatagcaaccagtgtttgatcatccgcgtcaatattctgttctatcgtagtgtataacaatcgtatatcttcttctgtgatagtcgatacgttataaaggttgataacgaaaatatttttatttcgtgaaataaagtcatcgtaggattttggacttatattcgcgtctagtagatatgcttttatttttggaatgatctcaattagaatagtctctttagagtccatttaaagttacaaacaactaggaaattggtttatgatgtataatttttttagtttttatagattctttattctatacttaaaaaatgaaaataaatacaaaggttcttgagggttgtgttaaattgaaagcgagaaataatcataaattatttcattatcgcgatatccgttaagtttgtatcgtaatggcgtggtcaattacgaataaagcggatactagtagcttcacaaagatggctgaaatcagagctcatctaaaaaatagcgctgaaaataaagataaaaacgaggatattttcccggaagatgtaataattccatctactaagcccaaaaccaaacgagccactactcctcgtaaaccagcggctactaaaagatcaaccaaaaaggaggaagtggaagaagaagtagttatagaggaatatcatcaaacaactgaaaaaaattctccatctcctggagtcagcgacattgtagaaagcgtggccgctgtagagctcgatgatagcgacggggatgatgaacctatggtacaagttgaagctggtaaagtaaatcatagtgctagaagcgatctctctgacctaaaggtggctaccgacaatatcgttaaagatcttaagaaaattattactagaatctctgcagtatcgacggttctagaggatgttcaagcagctggtatctctagacaatttacttctatgactaaagctattacaacactatctgatctagtcaccgagggaaaatctaaagttgttcgtaaaaaagttaaaacttgtaagaagtaaatgcgtgcacttttttataaagatggtaaactctttaccgataataattttttaaatcctgtatcagacgataatccagcgtatgaggttttgcaacatgttaaaattcctactcatttaacagatgtagtagtatatgaacaaacgtgggaggaggcgttaactagattaatttttgtgggaagcgattcaaaaggacgtagacaatacttttacggaaaaatgcatgtacagaatcgcaacgctaaaagagatcgtatttttgttagagtatataacgttatgaaacgaattaattgttttataaacaaaaatataaagaaatcgtccacagattccaattatcagttggcggtttttatgttaatggaaactatgttttttattagatttggtaaaatgaaatatcttaaggagaatgaaacagtagggttattaacactaaaaaataaacacatagaaataagtcccgatgaaatagttatcaagtttgtaggaaaggacaaagtttcacatgaatttgttgttcataagtctaatagactatataaaccgctattgaaactgacggatgattctagtcccgaagaatttctgttcaacaaactaagtgaacgaaaggtatacgaatgtatcaaacagtttggtattagaatcaaggatctccgaacgtatggagtcaattatacgtttttatataatttttggacaaatgtaaagtccatatctcctcttccgtcaccaaaaaagttaatagcgttaactatcaaacaaactgctgaagtggtaggtcatactccatcaatttcaaaaagagcttatatggcaacgactattttagaaatggtaaaggataaaaattttttagatgtagtatctaaaactacgttcgatgaattcctatctatagtcgtagatcacgttaaatcatctacggatggatgatatagatctttacacaaataattacaagaccgataaatggaaatggataagcgtatgaaatctctcgcaatgacagctttcttcggagagctaagcacattagatattatggcattgataatgtctatatttaaacgccatccaaacaataccattttttcagtggataaggatggtcagtttatgattgatttcgaatacgataattataaggcttctcaatatttggatctgaccctcactccgatatctggagatgaatgcaagactcacgcatcgagtatagccgaacaattggcgtgtgtggatattattaaagaggatattagcgaatatatcaaaactactccccgtcttaaacgatttataaaaaaataccgcaatagatcagatactcgcatcagtcgagatacagaaaagcttaaaatagctctagctaaaggcatagattacgaatatataaaagacgcttgttaataagtaaatgaaaaaaaactagtcgtttataataaaacacgatatggatgccaacgtagtatcatcttctactattgcgacgtatatagacgctttagcgaagaatgcttcagaattagaacagaggtctaccgcatacgaaataaataatgaattggaactagtatttattaagccgccattgattactttgacaaatgtagtgaatatctctacgattcaggaatcgtttattcgatttaccgttactaataaggaaggtgttaaaattagaactaagattccattatctaaggtacatggtctagatgtaaaaaatgtacagttagtagatgctatagataacatagtttgggaaaagaaatcattagtgacggaaaatcgtcttcacaaagaatgcttgttgagactatcgacagaggaacgtcatatatttttggattacaagaaatatggatcctctatccgactagaattagtcaatcttattcaagcaaaaacaaaaaactttacgatagactttaagctaaaatattttctaggatccggtgcccaatctaaaagttctttgttgcacgctattaatcatccaaagtcaaggcctaatacatctctggaaatagaattcacacctagagacaatgaaacagttccatatgatgaactaataaaggaattgacgactctctcgcgtcatatatttatggcttctccagagaatgtaattctttctccgcctattaacgcgcctataaaaacctttatgttgcctaaacaagatatagtaggtttggatctggaaaatctatatgccgtaactaagactgacggcattcctataactatcagagttacatcaaacgggttgtattgttattttacacatcttggttatattattagatatcctgttaagagaataatagattccgaagtagtagtctttggtgaggcagttaaggataagaactggaccgtatatctcattaagctaatagagcccgtgaatgctatcagtgatagactagaagaaagtaagtatgttgaatctaaactagtggatatttgtgatcggatagtattcaagtcaaagaaatacgaaggtccgtttactacaactagtgaagtcgtcgatatgttatctacatatttaccaaagcaaccagaaggtgttattctgttctattcaaagggacctaaatctaacattgattttaaaattaaaaaggaaaatactatagaccaaactgcaaatgtagtatttaggtacatgtccagtgaaccaattatctttggagaatcgtctatctttgtagagtataagaaatttagcaacgataaaggctttcctaaagaatatggttctggtaagattgtgttatataacggcgttaattatctaaataatatctattgtttggaatatattaatacacataatgaagtgggtattaagtccgtggttgtacctattaagtttatagcagaattcttagttaatggagaaatacttaaacctagaattgataaaaccatgaaatatattaactcagaagattattatggaaatcaacataatatcatagtcgaacatttaagagatcaaagcatcaaaataggagatatctttaacgaggataaactatcggatgtgggacatcaatacgccaataatgataaatttagattaaatccagaagttagttattttacgaataaacgaactagaggaccgttgggaattttatcaaactacgtcaagactcttcttatttctatgtattgttccaaaacatttttagacgattccaacaaacgaaaggtattggcgattgattttggaaacggtgctgacctggaaaaatacttttatggagagattgcgttattggtagcgacggatccggatgctgatgctatagctagaggaaatgaaagatacaacaaattaaactctggaattaaaaccaagtactacaaatttgactacattcaggaaactattcgatccgatacatttgtctctagtgtcagagaagtattctattttggaaagtttaatatcatcgactggcagtttgctatccattattcttttcatccgagacattatgctaccgtcatgaataacttatccgaactaactgcttctggaggcaaggtattaatcactaccatggacggagacaaattatcaaaattaacagataaaaagacttttataattcataagaatttacctagtagcgaaaactatatgtctgtagaaaaaatagctgatgatagaatagtggtatataatccatcaacaatgtctactccaatgactgaatacattatcaaaaagaacgatatagtcagagtgtttaacgaatacggatttgttcttgtagataacgttgatttcgctacaattatagaacgaagtaaaaagtttattaatggcgcatctacaatggaagatagaccgtctacaaaaaactttttcgaactaaatagaggagccattaaatgtgaaggtttagatgtcgaagacttacttagttactatgttgtttatgtcttttctaagcggtaaataataatatggtatgggttctgatatccccgttctaaatgcattaaataattccaatagagcgatttttgttcctataggaccttccaactgtggatactctgtattgttaatagatatattaatacttttgtcgggtaacagaggttctacgtcttctaaaaataaaagttttataacatctggcctgttcataaataaaaacttggcgattctatatatactcttattatcaaatctagccattgtcttatagatgtgagctactgtaggtgtaccatttgattttctttctaatactatatatttctctcgaagaagttcttgcacatcatctgggaataaaatactactgttgagtaaatcagttattttttttatatcgatattgatggacatttttatagttaaggataataagtatcccaaagtcgataacgacgataacgaagtatttatacttttaggaaatcacaatgactttatcagattaaaattaacaaaattaaaggagcatgtatttttttctgaatatattgtgactccagatacatatggatctttatgcgtcgaattaaatgggtctagttttcagcacggtggtagatatatagaggtggaggaatttatagatgctggaagacaagttagatggtgttctacatccaatcatatatctaaagatatacccgaagatatgcacactgataaatttgtcatttatgatatatacacttttgacgctttcaagaataaacgattggtattcgtacaggtacctccgtcgttaggagatgatagtcatttgactaatccgttattgtctccgtattatcgtaattcagtagccagacaaatggtcaataatatgatttttaatcaagattcatttttaaaatatttattagaacatctgattagaagccactatagagtttctaaacatataacaatagttagatacaaggataccgaagaattaaatctaacgagaatatgttataatagagataagtttaaggcgtttgtattcgcttggtttaacggcgtttcggaaaatgaaaaggtactagatacgtataaaaaggtatctaatttgatataatgaattcagtgactgtatcacacgcgccatatactattacttatcacgatgattgggaaccagtaatgagtcaattggtagagttttataacgaagtagccagttggctgctacgagacgagacgtcgcctattcctgataagttctttatacagttgaaacaaccgcttagaaataaacgagtatgtgtgtgcggtatagatccgtatccgaaagatggaactggtgtaccgttcgaatcaccaaattttacaaaaaaatcaattaaggagatagcttcatctatatctagattaaccggagtaattgattataaaggttataaccttaatataatagacggggttataccctggaattattacttaagttgtaaattaggagaaacaaaaagtcacgcgatctactgggataagatttccaagttactgctgcagcatataactaaacacgttagtgttctttattgtttgggtaaaacagatttctcgaatatacgggcaaagttagaatccccggtaactaccatagtcggatatcatccagcggctagagaccgccaattcgagaaagatagatcatttgaaattatcaacgttttactggaattagacaacaaggcacctataaattgggctcaagggtttatttattaatgctttagtgaaattttaacttgtgttctaaatggatgcggctattagaggtaatgatgttatctttgttcttaagactataggtgtcccgtcagcgtgcagacaaaatgaagatccaagatttgtagaagcatttaaatgcgacgagttagaaagatatattgagaataatccagaatgtacactattcgaaagtcttagggatgaggaagcatactctatagtcagaattttcatggatgtagatttagacgcgtgtctagacgaaatagattatttaacggctattcaagattttattatcgaggtgtcaaactgtgtagctagattcgcgtttacagaatgcggtgccattcatgaaaatgtaataaaatccatgagatctaatttttcattgactaagtctacaaatagagataaaacaagttttcatattatctttttagacacgtataccactatggatacattgatagctatgaaacgaacactattagaattaagtagatcatctgaaaatccactaacaagatcgatagacactgccgtatataggagaaaaacaactcttcgggttgtaggtactaggaaaaatccaaattgcgacactattcatgtaatgcaaccaccgcatgataatatagaagattacctattcacttacgtggatatgaacaacaatagttattacttttctctacaacaacgattggaggatttagttcctgataagttatgggaaccagggtttatttcattcgaagacgctataaaaagagtttcaaaaatattcattaattctataataaactttaatgatctcgatgaaaataattttacaacggtaccactggtcatagattacgtaacaccttgtgcattatgtaaaaaacgatcgcataaacatccgcatcaactatcgttggaaaatggtgctattagaatttacaaaactggtaatccacatagttgtaaagttaaaattgttccgttggatggtaataaactgtttaatattgcacaaagaattttagacactaactctgttttattaaccgaacgaggagaccatatagtttggattaataattcatggaaatttaacagcgaagaacccttgataacaaaactaattttgtcaataagacatcaactacctaaggaatattcaagcgaattactctgtccgaggaaacgaaagactgtagaagctaacatacgagacatgttagtagattcagtggagaccgatacctatccggataaacttccgtttaaaaatggtgtattggacctggtagacggaatgttttactctggagatgatgctaaaaaatatacgtgtactgtatcaaccggatttaaatttgacgatacaaagttcgtcgaagacagtccagaaatggaagagttaatgaatatcattaacgatatccaaccattaacggatgaaaataagaaaaatagagagctatatgaaaaaacattatctagttgtttatgcggtgctaccaaaggatgtttaacattcttttttggagaaactgcaactggaaagtcgacaaccaaacgtttgttaaagtctgctatcggtgacctgtttgttgagacgggtcaaacaattttaacagatgtattggataaaggacctaatccatttatcgctaacatgcatttgaaaagatctgtattctgtagcgaactacctgattttgcatgtagtgggtcaaagaaaatcagatctgataatattaaaaagttgacagaaccttgtgtcattggaagaccgtgtttctccaataaaattaataatagaaaccatgcgacaatcattatcgatactaattacaaacctgtttttgataggatagataacgcattaatgagaagaattgccgtcgtgcgattcagaacacacttttctcaaccttctggtagagaggctgctgaaaataatgacgcgtacgataaagtcaaactattagacgaggggttagatggtaaaatacaaaataatagatatagattcgcatttctatacttgttggtgaaatggtacagaaaatatcatgttcctattatgaaactatatcctacacccgaagagattcctgactttgcattctatctcaaaataggtactctgttggtatctagctctgtaaagcatattccattaatgacggacctctccaaaaagggatatatattgtacgataatgtggtcactcttccgttgactactttccaacagaaaatatccaagtattttaattctagactatttggacacgatatagagagcttcatcaatagacataagaaatttgccaatgttagtgatgaatatctgcaatatatattcatagaggatatttcatctccgtaaatatatgctcatatatttatagaagatatcacatatctaaatgaataccggaatcatagatttatttgataatcatgttgatagtataccaactatattacctcatcagttagctactctagattatctagttagaactatcatagatgagaacagaagcgtgttattgttccatattatgggatcaggtaaaacaataatcgctttgttgttcgccttggtagcttccagatttaaaaaggtttacattctagtgccgaacatcaacatcttaaaaattttcaattataatatgggtgtagctatgaacttgtttaatgacgaattcatagctgagaatatctttattcattccacaacaagtttttattctcttaattataacgataacgtcattaattataacggattatctcgctacaataactctatttttatcgttgatgaggcacataatatctttgggaataatactggagaacttatgaccgtgataaaaaataaaaacaagattccttttttactattgtctggatctcccattactaacacacctaatactctgggtcatattatagatttaatgtccgaagagacgatagattttggtgaaattattagtcgtggtaagaaagtaattcagacacttcttaacgaacgcggtgtgaatgtacttaaggatttgcttaaaggaagaatatcatattacgaaatgcctgataaagatctaccaacgataagatatcacggacgtaagtttctagatactagagtagtatattgtcacatgtctaaacttcaagagagagattatatgattactagacgacagctatgttatcatgaaatgtttgataaaaatatgtataacgtgtcaatggcagtattgggacaacttaatctgatgaataatttagatactttatttcaggaacaggataaggaattgtacccaaatctgaaaataaataatggcgtgttatacggagaagaattggtaacgttaaacattagttccaaatttaaatactttattaatcggatacagacactcaacggaaaacattttatatacttttctaattctacatatggcggattggtaattaaatatatcatgctcagtaatggatattctgaatataatggttctcagggaactaatccacatatgataaacggcaaaccaaaaacatttgctatcgttactagtaaaatgaaatcgtctttagaggatctattagatgtgtataattctcctgaaaacgatgatggtagtcaattgatgtttttgttttcatcaaacattatgtccgaatcctatactctaaaagaggtaaggcatatttggtttatgactatcccagatactttttctcaatacaaccaaattcttggacgatctattagaaaattctcttacgccgatatttctgaaccagttaatgtatatcttttagccgccgtatattccgatttcaatgacgaagtgacgtcattaaacgattacacacaggatgaattaattaatgttttaccatttgacatcaaaaagctgttgtatctaaaatttaagacgaaagaaacgaatagaatatactctattcttcaagagatgtctgaaacgtattctcttccaccacatccatcaattgtaaaagttttattgggagaattggtcagacaatttttttataataattctcgtattaagtataacgataccaagttacttaaaatggttacatcagttataaaaaataaagaagacgctaggaattacatagatgatattgtaaacggtcacttctttgtatcgaataaagtatttgataaatctcttttatacaaatacgaaaacgatattattacagtaccgtttagactttcctacgaaccatttgtttggggagttaactttcgtaaagaatataacgtggtatcttctccataaaactgatgagatatataaagaaataaatgtcgagctttgttaccaatggatacctttccgttacattggaacctcatgagctgacgttagacataaaaactaatattaggaatgccgtatataagacgtatctccatagagaaattagtggtaaaatggccaagaaaatagaaattcgtgaagacgtggaattacctctcggcgaaatagttaataattctgtagttataaacgttccgtgtgtaataacctacgcgtattatcacgttggggatatagtcagaggaacattaaacatcgaagatgaatcaaatgtaactattcaatgtggagatttaatctgtaaactaagtagagattcgggtactgtatcatttagcgattcaaagtactgcttttttcgaaatggtaatgcgtatgacaatggcagcgaagtcactgccgttctaatggaggctcaacaaggtatcgaatctagttttgtttttctcgcgaatatcgtcgactcataaaaaagagaatagcggtaagtataaacacgaatactatggcaataattgcgaatgttttattctcttcgatatatttttgataatatgaaaaacatgtctctctcaaatcggacaaccatctcataaaatagttctcgcgcgctggagaggtagttgccgctcgtataatctctccagaataatatacttgcgtgtcgtcgttcaatttatacggatttctatagttctctgttatataatgcggtttgccctcatgattagacgacgacaatagtgttctaaatttagatagttgatcagaatgaatgtttattggcgttggaaaaattatccatacagcgtctgcagagtggttgatagttgttcctagatatgtaaaataatccaacttactaggcagcaaattgtctagataaaatactgaatcaaacggtgcagacgtattggcggatctaatggaatccaattgattaactatcttttgaaaatatacatttttatgatccaatacttgtaagaatatagaaataatgataagtccatcatcgtgtttttttgcctcttcataagaactatattttttcttattccaatgaacaagattaatctctccagagtatttgtacacatctatcaagtgattggatccataatcgtcttcctttccccaatatatatgtagtgatgataacacatattcattggggagaaaccctccacttatatatcctcctttaaaattaatccttactagttttccagtgttctggatagtggttggtttcgactcattataatgtatgtctaacggcttcaatcgcgcgttagaaattgcttttttagtttctatattaataggagatagttgttgcggcatagtaaaaatgaaatgataactgtttaaaaatagctcttagtatgggaattacaatggatgaggaagtgatatttgaaactcctagagaattaatatctattaaacgaataaaagatattccaagatcaaaagacacgcatgtgtttgctgcgtgtataacaagtgacggatatccgttaataggagctagaagaacttcattcgcgttccaggcgatattatctcaacaaaattcagattctatctttagagtatccactaaactattacggtttatgtactacaatgaactaagagaaatctttagacggttgagaaaaggttctatcaacaatatcgatcctcactttgaagagttaatattattgggtggtaaactagataaaaaggaatctattaaagattgtttaagaagagaattaaaagaggaaagtgatgaacgtataacagtaaaagaatttggaaatgtaattctaaaacttacaacacgggataaattatttaataaagtatatataagttattgcatggcgtgttttattaatcaatcgttggaggatttatcgcatactagtatttacaatgtagaaattagaaagattaaatcattaaatgattgtattaacgacgataaatacgaatatctgtcttatatttataatatgctagttaatagtaaatgaacttttacagatctagtataattagtcagattattaagtataatagacgactagctaagtctattatttgcgaggatgactctcaaattattacactcacggcattcgttaaccaatgcctatggtgtcataaacgagtatccgtgtccgctattttattaactactgataacaaaatattagtatgtaacagacgagatagttttctctattctgaaataattagaactagaaacatgtttagaaagaaacgattatttctgaattattccaattatttgaacaaacaggaaagaagtatactatcgtcatttttttctctagatccagctactactgataatgatagaatagacgctatttatccgggtggcatacccaaaaggggtgagaatgttccagagtgtttatccagggaaattaaagaagaagttaatatagacaattcttttgtattcatagacactcggttttttattcatggcatcatagaagataccattattaataaattttttgaggtaatcttctttgtcggaagaatatctctaacgagtgatcaaatcattgatacatttaaaagtaatcatgaaatcaaggatctaatatttttagatccgaattcaggtaatggactccaatacgaaattgcaaaatatgctctagatactgcaaaacttaaatgttacggccatagaggatgttattatgaatcattaaaaaaattaactgaggatgattgattaaaaaatataaattaatttaccatcgtgtatttttataacgggattgtccggcatatcatgtagatagttaccgtctacatcgtatactcgaccatctacgcctttaaatcctctatttattgacattaatctattagaattggaataccaaatattagtaccctcaattagtttattggtaatattttttttagacgatagatcgatggctcttgaaaccaaggttttccaaccggactcattgtcgatcggtgagaagtctttttcattagcatgaatccattctaatgatgtatgtttaaacactctaaacaattggacaaattcttttgatttgctttgaatgatttcaaataggtcttcgtctacagtaggcataccattagataatctagccattataaagtgcacgtttacatatctacgttctggaggagtaagaacgtgactattgagacgaatggctcttcctactatctgacgaagagacgcctcgttccatgtcatatctaaaatgaagatatcattaattgagaaaaaactaataccctcgcctccactagaagagaatacgcatgttttaatgcattctccgttagtgtttgattcttggttaaactcagccaccgccttgattctagtatcttttgttctagatgagaactctatattagagataccaaagactttgaaatatagtaataagatttctattcctgactgattaacaaatggttcaaagactagacatttaccatgggatgctaatattcccaaacatacatctataaatttgacgcttttctcttttaattcagtaaatagagagatatcagccgcactagcatcccctttcaatagttctccctttttaaaggtatctaatgcggatttagaaaactctctatctcttaatgaatttttaaaatcattatatagtgttgctatctcttgcgcgtattcgcccggatcacgattttgtctttcaggaaagctatcgaacgtaaacgtagtagccatacgtctcagaattctaaatgatgatatacctgtttttatttcagcgagtttagccttttgataaatttcttcttgctttttcgacatattaacgtatcgcattaatactgttttcttagcgaatgatgcagacccttctacgtcatcaaaaatagaaaactcgttattaactatatacgaacatagtcctcctagtttggagactaattctttttcatcgactagacgtttattctcaaatagtgattggtgttgtaaggatcctggtcgtagtaagttaaccaacatggtgaattcttgcacactattgacgataggtgtagccgataaacaaatcatcttatggttttttaacgcaatggtcttagataaaaaattatatactgaacgagtaggacggatcttaccatcttctttgattaatgatttagaaatgaagttatgacattcatcaatgatgacgcatattctactcttggaattaatagttttgatattagtaaaaaatttatttctaaaattttgatcatcgtaattaataaaaatacaatccttcgttatctctggagcgtatctgagtatagtgttcatccaaggatcttctatcaaagcctttttcaccaataagataatagcccaattcgtataaatatccttaagatgtttgagaatatatacagtagtcattgttttaccgacacccgtttcatggaacaataaaagagaatgcatactgtctaatcctaagaaaactcttgctacaaaatgttgataatccttgaggcgtactacgtccgaccccatcatttcaacgggcatattagtagttctgcgtaaggcataatcgatataggccgcgtgtgatttactcatttatgagtgataagtaataactatgttttaaaaatcacagcagtagtttaactagtcttctctgatgtttgttttcgatactttttgaatcagaagtcatactagaataaagcaacgagtgaacgtaatagagagcttcgtatactctattcgaaaactctaagaacttattaatgaattccgtatccactggattgtttaaaatactaaattgaacactgttcacatccttccaagaagaagacttagtgacggacttaacatgagacataaataaatccaaattttttttacaaacatcactagccaccataatggcgctatctttcaaccagctatcgcttacgcattttagcagtctaacatttttaaagagactacaatatattctcatagtatcgattacacctctaccgaataaagttggaagtttaataatacaatatttttcgtttacaaaatcaaataatggtcgaaacacgtcgaaggttaacatcttataatcgctaatgtatagattgttttcagtgagatgattattagatttaatagcatctcgttcacgtttgaacagtttattgcgtgcgctgaggtcggcaactacggcgtccgctttagtactcctcccataatactttacgctattaatctttaaaatttcatagactttatctagatcgctttctggtaacatgatatcatgtgtaaaaagttttaacatgtcggtcggcattctatttagatcattaactctagaaatctgaagaaagtaattagctccgtattccagactaggtaatgggcttttacctagagacagattaagttctggcaatgtttcataaaatggaagaaggacatgcgttccctcccggatattttttacaatttcatccatttacaactctatagtttgttttcattattattagttattatctcccataatcttggtaatacttaccccttgatcgtaagataccttatacaggtcattacatacaactaccaattgtttttgtacataatagattggatggttgacatccatggtggaataaactactcgaacagatagtttatctttccccctagatacattagccgtaatagttgtcggcctaaagaatatctttggtgtaaagttaaaagttagggttcttgttccattattgctttttgtcagtagttcattataaattctcgagatgggtccgttctctgaatatagaacatcatttccaaatctaacttctagtctagaaataatatcggtcttattcttaaaatctattcccttgatgaagggatcgttaatgaacaaatccttggcctttgattcggctgatctattatctccgttatagacgttacgttgactagtccaaagacttacaggaatagatgtatcgatgatgttgatactatgtgatatgtgagcaaagattgttctcttagtggcatcactatatgttccagtaatggcggaaaactttttagaaatgttatatataaaagaattttttcgtgttccaaacattagcagattagtatgaagataaacactcatattatcaggaacattatcaatttttacatacacatcagcatcttgaatagaaacgataccatcttctggaacctctacgatctcggcagactccggataaccagtcggtgggccatcgctaacaataactagatcatccaacaatctactcacatatgcatctatataatctttttcatcttgtgagtaccctggatacgaaataaatttattatccgtatttccataataaggtttagtataaacagagagagatgttgccgcatgaacttcagttacagtcgccgttggttggtttatttgacctattactctcctaggtttctctataaacgatggtttaatttgtacattcttaaccatatatccaataaagctcaattcaggaacataaacaaattctttgttgaacgtttcaaagtcgaacgaagagtcacgaataacgatatcggatactggattgaaggttaccgttacggtaatttttgaatcggatagtttaagactgctgaatgtatcttccacatcaaacggagttttaatataaacgtatactgtagatggttctttaatagtgtcattaggagttaggccaatagaaatatcattaagttcactagaatatccagagtgtttcaaagcaattgtattattgatacaattattatataattcttcgccctcaatttcccaaataacaccgttacacgaagagatagatacgtgattaatacatttatatccaacatatggtacgtaactgaatcttcccatacctttaacttctggaagttccaaactcagaaccaaatgattaagcgcagtaatatactgatccctaatttcgaagctagcgatagcctgattgtctggaccatcgtttgtcataactccggatagagaaatatattgcggcatatataaagttggaatttgactatcgactgcgaagacattagaccgtttaatagagtcatccccaccgatcaaagaattaatgatagtattattcattttctatttaaaatggaaaaagcttacaataaactccgtagagaaatatctataatttgtgagttttccttaaagtaacagcttccgtaaacgccgtctttatctcttagtaggtttattgtatttatgaccttttccttatcttcatagaatactaaaggcaacaaagaaatttttggttcttctctaagagctacgtgagacttaaccatagaagccaacgaatccctacatattttagaacagaaataccctacttcaccacccttgtatgtctcaatactaataggtctaaaaaccaaatcttgattacaaaaccaacacttatcaattacactatttgtcttaatagacacatctgccatagatttataatactttggtagtatacaagcgagtgcttcttctttagcgggcttaaagactgctttaggtgctgaaataaccacatctggaaggcttactcgcttagccatttaattacggaactatttttttatacttctaatgagcaagtagaaaacctctcatctacaaaaacgtactcgtgtccataatcctctaccatagttacacgttttttagatctcatatgtgctaaaaagttttcccatactaattggttactattatttttcgtataatttttaacagtttgaggttttagatttttagttacagaagtgatatcgaatattttatccaaaaagaatgaataattaattgtcttagaaggagtgttttcttggcaaaagaataccaagtgcttaaatatttctactacttcattaatcttttctgtactcagattcagtttctcatcttttacttgattgattatttcaaagactaacttataatcctttttatttattctctcgttagccttaagaaaactagatacaaaatttgcatctacatcatccgtggatatttgatttttttccatgatatccaagagttccgagataatttctccagaacattgatgagacaataatctccgcaatacatttctcaaatgaataagtttattagacacgtggaagtttgactttttttgtacctttgtacatttttgaaataccgactcgcaaaaaatacaatattcatatccttgttcagatactataccgttatgtctacaaccgctacataatcgtagattcatgttaacactctacgtatctcgtcgtccaatattttatataaaaacattttatttctagacgttgccagaaaatcctgtaatatttttagttttttgggctgtgaataaagtatcgccctaatattgttaccgtcttccgccaatatagtagttaaattatccgcacatgcagaagaacaccgcttaggcggattcagtacaatgttatatttttcgtaccaactcatttaaatatcataatctaaaatagttctgtaatatgtctagcgctaatatattgatcataatcctgtgcataaattaagatacaacaatgtctcgaaatcatcgacatggcttcttccatagttagaagatcgtcgtcaaagttagcaacgtgattcatcaacatttgctgttttgaggcagcaaatactgaaccgtcgccattcaaccattcataaaaaccatcgtctgaatccattgataatttcttgtactggtttttgagagctcgcatcaatctagcatttctagctcccggattgaaaacagaaagaggatcgtacatccagggtccattttctgtaaatagaatcgtataatgtcccttcaagaagatatcagacgatccacaatcaaagaattggtctccgagtttgtaacaaactgcggactttaacctatacatgataccgtttagcataatttctggtgatacgtcaatcggagtatcatctattagagatctaaagccggtgtaacattctccaccaaacatattcttattctgacgtcgttctacataaaacatcattgctccattaacgataacaggggaatgaacagcactacccatcacattagttcccaatggatcaatgtgtgtaactccagaacatcttccatagcctatgttaggaggagcgaacaccactcttccactattgccatcgaatgccatagaataaatatccttggaattgatagaaatcggactgtcggatgttgtgatcatcttcataggattaacaactatgtatggtgccgcctgaagtttcatatcgtaactgatgccgtttataggtctagccacagaaaccaacgtaggtctaaatccaactatagacaaaatagaagccaatatctgttcctcatctgtcataacttgagagcatccagtatgaataatcttcattagatggggatctaccgcatcatcatcgttacaataaaaaattcccattctaatgttcataattgcttttctaatcatggtatgcatgtttgctctctgaatctctgtggaaattagatctgatacacctgtaatcactatcggattatcctccgtaagacgattaaccaacaacatataattataagactttacttttctaaattcataaagttgctggattaggctataggtgtctccatgtacatacgcgttctcgagcgcaggaagtttaataccgaatagtgccatcagaataggatgaatatagtaattagtttctggttttctataaataaaagacaaatcttgtgaactagacatatcggtaaaatgcatggattggaatcgtgtagtcgacagaagaatatgatgattagatggagagtatattttatctaactctttgagttggtcaccgattctaggactagctcgagaatgaataagtactaaaggatgagtacatttcacagaaacactagcattgttcaatgtgctctttacatgggtaaggagttgaaatagctcgtttctatttgttctgacaatatttagtttattcataatgttaagcatatcctgaatagtaaagttagatgtgtcatacttgttagtagttagatatttagcaattgcattcccatcatttctcaatctcgtactccaatcatgtgtagatgctacttcgtcgatggaaaccatacaatcctttttgataggctgttgagattgatcatttcctgcacgtttaggtttggtacgttgatttctagcccctgcggatataaagtcatcgtctacaatttgggacaatgaattgcatacactacaagacaaagatttatcagaagtgtgaatatgatcttcatctaccaaagaaagagtttgattagtataactagattttagtcctgcgttagatgttaaaaaaacatcgctattgaccacggcttccattatttatattcgtagtttttactcgaaagcgtgattttaatatccaatcttattacttttggaatcgttcaaaacctttgactagttgtagaatttgatctattgccctacgcgtatactcccttgcatcatatacgttcgtcaccagatcgtttgtttcggcctgaagttggtgcatatctctttcaacattcgacatgagatccttaagggccatatcgtctagattttgttgagatgctgctcctggatttggattttgttgtgctgttgtacatactgtaccaccagtaggtgtaggagtacatacagtggccacaataggaggttgagaaagtgtaaccgttggagtagtacaagaaatacttccatccgattgttgtgtacatgtagttgttggtaacgtctgagaaggttgggtagatggcggcgtcgtcgttttttgatctttattaaatttagagataatatcctgaacagcattgctcggcgtcaacgctggaaggagtgaactcgccggcgcatcagtatcttcagacagccaatcaaaaagattagacatatcagatgatgtattagtttgttgtcgtggttttggtgtaggagcagtactactaggtagaagaataggagccgatgtagctgttggaaccggctgtggagttatatgaatagttggttgtagcggttggataggctgtctgctggcggccatcatattatctctagctagttgttctcgcaactgtctttgataatacgactcttgagactttagtcctatttcaatcgcttcatcctttttcgtatccggatccttttcttcagaataatagattgacgactttggtgtagaggattctgccagcctctgtgagaacttgttaaagaagtccatttaaggctttaaaattgaattgcgattataagattaaatggcagacacagacgatattatcgactatgaatccgatgatctcaccgaatacgaggatgatgaagaagaggaagaagatggagagtcactagaaactagtgatatagatcccaaatcttcttataagattgtagaatcagcatccactcatatagaagatgcgcattccaatcttaaacatatagggaatcatatatctgctcttaaacgacgctatactagacgtataagtctatttgaaatagcgggtataatagcagaaagctataacttgcttcaacgaggaagattacctctagtttcagaattttctgacgaaacgatgaagcaaaatatgctacatgtaattatacaagagatagaggagggttcttgtcctatagtcatcgaaaagaacggagaattgttgtcggtaaacgattttgacaaagatggtctaaaattccatctagactatattatcaaaatttggaaacttcaaaaacgatattagaatttatacgaatatcgttctctaaatgtcacaatcaagtctcgcatgttcagcaatttattgtcgtactttatatcgtgttcattaacgatatcttgcaaaatagtaatgattctatcttccttcgatagatattcttcagagattattgtcttatattctttcttgttatcagatatgaatttgataagactttgaacattattgatacccgtctgtttaattttttctacagatattttagttttggcagattctatcgtatctgtcaatagacatccaacatcgacattcgacgtcaattgtctataaatcaacgtataaattttagaaataacattagcgaattgttgtgcgttgatgtcgttattctgaaacagtatgattttaggtagcattttcttaacaaagagaacgtatttattgttactcagttgaacagatgatatatccagattactaacgcatctgattccgtataccaaactttcagaagaaatggtatacaattgtttgtattcattcaatgtctctttttcagaaattagtttagagtcgaatactgcaataattttcaagagatagttttcatcagataagattttatttagtgtagatatgataaaactattgttttgttggagaacttgatacgccgcgttctctgtagtcgacgctctcaaatgggaaacaatctccattatttttttggaatcggatactatatcttcggtatcttgacgcagtctagtatacatagagttaagagagattagagtttgtacattaagcaacatgtctctaaatgtggctacaaacttttcctttttcacatcatctagtttattatataccgatttcacaacggcaccagatttaaggaaccagaatgaaaaactctgataactacaatatttcatcatagttacgattttatcatcttctatagttggtgtaatagcgcatacctttttctccaagactggaaccaacgtcataaaaatgtttaaatcaaaatccatatcaacatctgatgcgctaagaccagtctcgcgttcaagattatctttactaatggtgacgaactcatcgtataaaactctaagtttgtccattatttatttacagatttagttgtttaatttatttgtgctcttccagagttgggatagtatttttctaacgtcggtattatattattaggatctacgttcatatgtatcataatattaatcatccacgttttgataaatctatctttagcttctgaaataacgtatttaaacaaaggagaaaaatatttagctacggcatcagacgcaataacattttttgtaaatgtaacgtatttagacgacagatcttcgttaaaaagttttccatctatgtagaatccatcggttgttaacaccattcccgcgtcagattgaataggagtttgaatagtttgttttggaaatagatccttcaataacttatagttgggtgggaaaaaatcgattttatcactagactctttcttttttactatcattacctcatgaactatttcttgaatgagtatatgtattttctttcctatatcggacgcgttcattggaaaatataccatgtcgttaactataagaatatttttatcctcgtttacaaactgaataatatcagatgtagttcgtaaacgaactatatcatcaccagcacaacatctaactatatgatatccactagtttcctttagccgtttattatcttgttccatattagcagtcattccatcatttaagaaggcgtcaaagataatagggagaaatgacattttggattctgttacgactttaccaaaattaaggatatacggacttactatctttttctcaacgtcaatttgatgaacacacgatgaaaatgtgcttctatgagattgatcatgtagaaaacaacaagggatacaatatttccgcatatcatgaaatatattaagaaatcccaccttattatatttccccaaaggatccatgcacgtaaacattatgccgttatcattaataaagacttctttctcatcggatctgtaaaagttgttactgatttttttcattccaggatctagataattaataatgatgggttttctattcttattctttgtattttggcatatcctagaccagtaaacagtttccactttggtaaaatcagcagacttttgaacgctattaaacatggcattaatggcaataactaaaaatgtaaaatatttttctatgttaggaatatggtttttcactttaatagatatatggtttttggccaaaatgatagatatttttttatccgaggatagtaaaatattattagtcgccgtctctataaaaatgaagctagtctcgatatccaattttattctagaattgataggagtcgccaaatgtaccttatacgttatatctcccttgatgcgttccatttgtgtatctatatcggacacaagatctgtaaatagttttacgttattaatcatcacggtatcgccgtcgctagataacgctaatgtaccatccaagtcccaaatggagagatttaactgttcatcgtttagaataaaatgattaccggtcatattaataaagtgttcatcgtatctagataacaacgacttataattaatgtccaagtcttgaactcgctgaatgatcttttttaacccagttagttttagattggtacgaaatatattgttaaactttgattctacagtaatgtccaaatctagttgtggaaatacttccatcaacattgtttcaaacttgataatattattatctacatcttcgtacgatccaaattccggaatagatgtatcgcacgctctggccacccagataaccaaaaagtcacacgctccaggatatacattgtataaaaagctatcgttttttagtagggtttttttctgcgtgtatacgaagggattaaaaatagtattatcaacgtaactatattccaaattattcttatgagaatagataataatatcgtccttaatatctaacaaatttcctaaatatccctttaattgagtcattcgaagcgtcaatagaatatgtctcttaactatttccggctgttgtatatttaaatgacttcgtaaaaaataatatatgggcgacttctcatctatgtaatcatatggagtgagatatagggctcgttctacctcctgccccttacccacctgtaataccaattgcggacttactatatatcgcatatttatatcgtggggtaaagtgaaaatctactaccgatgatgtaagtcttacaatgttcgaaccagtaccagatcttaatttggaggcctccgtagaactaggggaggtaaatatagatcaaacaacacctatgataaaggagaatagcggttttatatcccgcagtagacgtctattcgcccatagatctaaggatgatgagagaaaactagcactacgattctttttacaaagactttattttttagatcatagagagattcattatttgttcagatgcgttgacgctgtaaaagacgtcactattaccaaaaaaaataacattatcgtggcgccttatatagcacttttaactatcgcatcaaaaggatgcaaacttacagaaacaatgattgaagcattctttccagaactatataatgaacatagtaagaaatttaaattcaactctcaagtatccatcatccaagaaaaactcggataccagtttggaaactatcacgtttatgattttgaaccgtattactctacagtagctctggctattcgagatgaacattcatctggcatttttaatatccgtcaagagagttatctggtaagttcattatctgaaataacatatagattttatctaattaatctaaaatctgatcttgttcaatggagtgctagtacgggcgctgtaattaatcaaatggtaaatactgtattgattacagtgtatgaaaagttacaactggtcatagaaaatgattcacaatttacatgttcattggctgtggaatcaaaacttccaataaaattacttaaagatagaaatgaattatttacaaaattcattaacgagttaaaaaagaccagttcattcaagataagcaaacgcgataaggatacgctactaaaatattttacttaggactggagttagaatttatagacgactcatttcgtttatcattgttactattattactattactatcattattagtgttggcattattagtattcttcttgtcatcttgttcagaaatatacagcaatgctatacctaatactaaatacattatcatgctcgcaatggctctaacaacaacgaaccaaaatgaatttggtcgtagcttttgttcacaaaaatacataaagaaatgtctacataaatctatggcgccattggctacttgaaatagcgccagtcctcctacagattttaatatagctgtataacatgacatttattcatcatcaaaagagacagagtcaccatctgtcatatttagattttttttcatgtgttcaaagtatcctctactcatttcattataatagtttatcatacttagaattttaggacggatcaatgagtaagacttgactagatcgtcagtagtaatttgtgcatcgtctattctgcatccgcttcgtcgaataatgtatagcatcgctttgagattctccatagctatcaagtctttatacaatgacatggaaatatctgtgaatactttatacttctccaacatcgatgccttaacatcatcgcctactttagcattgaaaatacgttctattgtgtagatggatgtagcaagatttttaaacaacaatgccatcttacacgatgattgcctcaagtctccaatcgtttgtttagaacgattagctacagagtccaatgcttggctgactagcatattattatctttagaaattgtattcttcaatgaggcgtttatcatatctgtgatttcgttagtcatattacagtctgactgggttgtaatgttatccaacatatcacctatggatacggtacacgtaccagcatttgtaataatcctatctaagatgttgtatggcattgcgcagaaaatatcttctcctgtaatatctccactctcgataaatctactcagattattcttaaatgccttattctctggagaaaagatatcagtgtccatcatttcattaatagtatacgcagaaaagataccacgagtatcaattctatccaagatacttatcggttccgagtcacagataatggtttcctctccttcgggagatcctgcatagaaatatctaggacaatagtttctatactgtctgtaactctgataatctctaaagtcactaactgataccatgaaattgagaagatcaaacgctgaagtaattaatttttctgcctcgtttttactacaactagttttcatcaatgtagtgacgatgtattgtttagttacttttggtctaatactgatgatagagatattattgcttcccataatggatcttctagtagtcaccttaaagcccattgatgcgaatagcagatagataaagtcttggtatgactcctttctaatatagtacggactacctttgtcacccaactttatacccacataagccataacaacctctttaatagccgtttcatgaggtttatcagccatgagcctgagtagttggaagaatctcatgaatcccgtctcagaaagtcctatatgcatgatagatttatctttcctgggaaactctcgtatagtcatagatgaaatactctttaaagtttctgaaataagattagtaacagtcttacctccgactactctaggtaacaaacaaactctaataggtgttttctctgcggagataatatcagaaaggatagagcaataagtagtattattgtgattataaagaccgaatacataacaggtagaatttataaacatcatgtcctgaaggtttttagacttgtattcctcgtaatccataccgtcccaaaacatggatttggtaactttgatagccgtagatctttgttccttcgccaacaggttaaagaaattaataaagaatttgttgtttctatttatgtccacaaattgcacgtttggaagcgccacggttacattcactgcagcattttgaggatcgcgagtatgaagtacgatgttattgtttactggtatatctggaaagaaatctaccagtctaggaataagagattgatatcgcatagaaatagtaaagtttataatctcatcatcgaagagcattttgttaccattgtaataaatatccactctgtcatatgtataaatgaagtactgttcaaacatgatgagatgtttatatgttggcatagtagtgagatcgacgtttggtaatggcaatgtattaagattaactccataatgtctagcagcatctgcgatgttataagcgtcgtcaaagcggggtcgatcttgtattgttatatattgtctaacacctataagattatcaaaatcttgtctgcttaatacaccgttaacaatttttgccttgaattcttttattggtgcattaataacatccttatagaggatgttaaacaaataagtgttatcaaagttaagatctggatatttcttttctgctagaacatccattgagtcggagccatctggtttaatataaccaccgataaatctagctctgtattctgtatccgtcaatctaatattaagaaggtgttgagtgaaaggtggaagatcgtaaaagctgtgagtattaatgataggattagtttccgaactaatgttaattggggtattaataatatctatatttccagcgttaagtgtaacattaaacagttttaattcacgtgacgtggtatcaattaaataattaatgcccaatttggatatagcagcctgaagctcatcttgtttagttacggatcctaatgagttattaagcaatatatcgaacggatgaacgaaggttgttttaagttggtcacatactttgtaatctagacatagatgcggaagaacggtagaaactatacgaaataaatattcagagtcctctaattgatcaagagtaactattgacttaataggcatcatttatttagtattaaatgacgaccgtaccagtgacggatatacaaaacgatttaattacagagttttcagaagataattatccatctaacaaaaattatgaaataactcttcgtcaaatgtctattctaactcacgttaacaacgtggtagatagagaacataatgccgccgtagtgtcatctccagaggaaatatcctcacaacttaatgaagatctatttccagatgatgattcaccggccactattatcgaacgagtacaacctcatactactattattgacgatactccacctcctacgtttcgtagagagttattaatatcggaacaacgtcaacaacgagaaaaaagatttaatattacagtatcgaaaaatgctgaagcaataatggaatctagatctatgataacttctatgccaacacaaacaccatccttgggagtagtttatgataaagataaaagaattcagatgttagaggatgaagtggttaatcttagaaatcaacgatctaatacaaaatcatctgataatttagataattttaccaaaatactatttggtaagactccgtacaaatcaacagaagttaataagcgtatagccatcgttaattatgcaaatttgaacgggtcccccttatcagtcgaggacttggatgtttgttcggaggatgaaatagatagaatctataaaacgattaaacaatatcacgaaagtagaaaacgaaaaattatcgtcactaacgtgattattattgtcataaacattatcgagcaggcattgctaaaactcggatttgaagaaatcaaaggactgagtaccgatatcacttcagaaattatcgatgtggagatcggagatgactgcgatgctgtagcatctaaactaggaatcggtaacagtccggttcttaatattgtattgtttatactcaagatattcgttaaacgaattaaaattatttaatttaatacattcccatatccagacaacaatcgtctggattaatctgttcctgtcgtctcataccggacgacatattaatctttttattagtgggcatctttttagatggtttctttttcccagcattaactgagtcgatacctagaagatcgtgattgatctctccgaccattccacgaacttctaattggccgtctctgacggtaccataaactattttaccagcattagtaacagcttggacaatctgaccatccatcgcattgtacgatgtagtagtaactgttgttctacgtctaggagcaccagaagtatttttggagcccttggatgttgatgtagaagaagacgaggattttgattttggtttacatgtaatacattttgaactctttgattttgtatcacatgcgccggcagtcacatctgtttgagaattaagattattgttgcctcctttgacggctgcatctccaccgatttgcgctagtagatttttaagctgtggtgtaatcttattaactgtttcgatataatcatcgtaactgcttctaacggctaaattttttttatccgccatttagaagctaaaaatatttttatttatgcagaagatttaactagattatacaatgaactaatatgatccttttccagattatttacaaacttggtattttttggttctggaggaggcgaatttaaattcggacttggattcggattttgtaagttcttgatcttattatacatcgagtataggatggcgacagtaactgctacacaaataccgatcaaaagaagaataccaatcatttattgacaataacttcactattgatcaagtatgcaatatatcatcttttcactaaataagtagtaataatgattcaacaatgtcgagatatatggacgataataatttagttcatggaaatatcgctatgattggtgtgaatgactccgctaactctgtggggtgcgcagtgctttccccacatagaataaattagcattccgactgtgataataataccaagtataaacgccataatactcaatactttccatgtacgagtgggactggtagacttactaaagtcaataaaggcgaagatacacgaaagaatcaaaagaatgattccagcgattagcacgccggaaaaataatttccaatcataagcatcatgtccatttaactaataaaaattttaaatcgccgaatgaacaaagtggaatataaaccatataaaaacaatagtttgtactgcaaaaataatatctatttttgttttcgaagatatggtaaaattaaatagtagtacacagcatgttataactaacagcagcaacggctcgtaattacttatcatttactagacgaaaaggtggtgggatattttcttgctcaaataatacgaatatatcacccatccattttatgcgatgtttatatactctaatctttaatagatctatagacgacgggtttaccaacaatatagattttatcgattcatctaatttaaacccttccttaaacgtgaatgatctattatctggcataacgatgaccctacctgatgaatcggacaatgtactgggccatgtagaataaattatcaacgaattatcgtctacgaacatttatatcatttgttttaattttaggacgcgaataaatggatataaaatagaaaataacagatattacaaccagtgttatggccgcgcccaaccaggtaggcagttttattttatcttttactacaggttctcctggatgtacgtcaccaacggcggacgtagttctagtacaattagacgtaagttccgcttgggaattttttaacgctaaagagttaacgttaatcgtgcacccaacgtatttacatctagttcgttgaacatcttgattataatataaccattttctatctctagattcgtcagtgcactcatgtaaccaacataccctaggtcctaaatatttatctccggaattagattttggataattcgcgcaccaacaatttctatttcctttatgatcgttacaaaagacgtataatgccgtatccccaaaagtaaaataatcaggacgaataattctaataaactcagaacaatatctcgcatccatatgtttggagcaaatatcggaataagtagacatagccggtttccgttttgcacgtaaccattctaaacaattggggtttccaggatcgtttctacaaaatccagtcatgaaatcgtcacaatgttctgtcttgtaattattattaaatatttttggacagtgtttggtatttgtcttagaacaacattttgccacgctatcactatcgcccaggagataatccttttttataaaatgacatcgttgcccggatgctatataatcagtagcgtgttttaaatccttaatatattcaggagttacctcgttctgataatagattaatgatccaggacgaaatttgaaagaactacatggttctccatgaattaatacatattgtttagcaaattcaggaactataaaactactacaatgatctatcgacataccatctatcaaacaaaacttgggtttaatttctcccggagatgtttcataatagtacgtataactttcttctgcaaacttaacagctctattatattcaggataattaaaacctaattccatatatttgtctcgtatatctgctattcctggtgctattttgattctattaagagtaacagctgcccccattcttaataatcgtcagtatttaaactgttaaatgttggtatatcaacatctaccttatttcccgcagtataaggtttgttgcaggtatactgttcaggaatggttacatttatacttcttctatagtcctgtctttcgatgttcatcacatatgcaaagaacagaataaacaaaataatgtaagaaataatattaaatatctgtgaattcgtaaatacattgattgccataataattacagcagctacaatacacacaatagacattcccacagtgttgccattacctccacgatacatttgagttactaagcaataggtaataactaagctagtaagaggcaatagaaaagatgagataaatatcatcaatatagagattagaggagggctatatagagccaagacgaacaaaatcaaaccgagtaacgttctaacatcattatttttgaagattcccaaataatcattcattcctccataatcgttttgcatcatacctccatctttaggcataaacgattgctgctgttcctctgtaaataaatctttatcaagcactccagcacccgcagagaagtcgtcaagcatattgtaatatcttaaataactcatttatatattaaaaaatgtcactattaaagatggagtataatctttatgccgaactaaaaaaaatgacttgtggtcaacccctaagtctttttaacgaagacggggatttcgtagaagttgaaccgggatcatcctttaagtttctgatacctaagggattttacgcctctccttccgtaaagacgagtctagtattcgagacattaacaacgaccgataataaaatcactagtatcaatccaacaaatgcgccaaagttatatcctcttcaacgcaaagtcgtatctgaagtagtttctaatatgaggaaaatgatcgaatcaaaacgtcctctatacattactcttcacttggcgtgtggatttggtaagactattaccacgtgttatcttatggctacacacggtagaaaaaccgtcatttgcgtacccaataaaatgttaatacatcaatggaagacacaggtagaggcagtcggattggaacataagatatccatagatggagtaagtagtctattaaaggaactaaagactcaaagtccggatgtattaatagtagtcagtagacatctgacaaacgatgccttttgtaaatatatcaataagcattatgatttgttcatcttggatgaatcacatacgtataatctgatgaacaatacagcagttacaagatttttagcgtattatcctccgatgatgtgttattttttaactgctacacctagaccatctaaccgaatttattgtaacagtattattaatattgccaagttatccaatctaaaaaaaactatctatgcagtagatagtttttttgagccatattccacagataatattagacatatggtaaaacgactagatggaccatctaataaatatcatatatataccgagaagttattatctgtagacgagcctagaaatcaacttattcttgataccctggtagaagaattcaagtcaggaactattaatcgcattttagttattactaaactacgtgaacatatggtattattctacaaacgattattagattttttcggaccagaggttgtatttataggagacgcccaaaatagacgtactccagatatggtcaaatcaatcaaggaactaaatagatttatattcgtatccaccttattttattccggtactggtttagatattcctagtttggattcgttgttcatttgctcggcagtaatcaacaatatgcaaatagagcaattactagggagggtatgtcgagaaacagaactattagataggacggtatatgtatttcctaacacatccatcaaagaaataaagtacatgataggaaatttcatgcaacgaattattagtctgtctgtagataaactaggatttaaacaaaaaagttatcggaaacatcaagaatccgatcccacttctgcatgtacaacatcatccagagaagaacgtgtattaaatagaatatttaactcgcaaaatcgttaagaagtttaagcgacgatccgcatgctgcgcaggccagtgtattacccctcatagtattaatataatccaatgatacttttgtgatgtcggaaatcttaaccaatttagactgacaggcagaacacgtcatgcaatcatcatcgtcatcgataactgtagtcttgggcttctttttgcgactcttcattccggaacgcacattggtgctatccatttaggtagtaaaaaataagtcagaatatgccctataacacgatcgtgcaaaacctggtatatcgtctctatctttatcacaatatagtgtatcgacatttttattattattgacctcgtttatcttggaacatggaatgggaacatttttgttatcaacggccatctttgccttaattccagatgttgtaaaattataactaaacagtctatcatcgacacaaatgaaattcttgtttagacgtttgtagtttacgtatgcggctcgttcgcgtctcattttttcagatattgcaggtactataatattaaaaataagaatgaaataacataggattaaaaataaagttatcatgacttctagcgctgatttaactaacttaaaagaattacttagtctgtacaaaagtttgagattttcagattctgcggctatagaaaagtataattctttggtagaatggggaacatctacttactggaaaataggcgtgcaaaaggtagctaatgtcgagacgtcaatatctgattattatgatgaggtaaaaaataaaccgtttaatattgatccgggctattacattttcttaccggtatattttgggagcgtctttatttattcgaagggtaaaaatatggtagaacttggatctggaaactcttttcaaataccagatgatatgcgaagtgcgtgtaacaaagtattagacagcgataacggaatagactttctgagatttgttttgttaaacaatagatggataatggaagatgctatatcaaaatatcagtctccagttaatatatttaaactagctagtgagtacggattaaacatacccaaatatttagaaattgaaatagaggaagacacattatttgacgacgagttatactctattatagaacgctctttcgatgataaatttccaaaaatatccatatcgtatattaagttgggagaacttagacggcaagttgtagactttttcaaattctcattcatgtatattgagtccatcaaggtagatcgtataggagataatatttttattcctagcgttataacaaaatcaggaaaaaagatattagtaaaagatgtagaccatttaatacgatccaaggttagagaacatacatttgtaaaagtaaaaaagaaaaacacattttccattttatacgactatgatggaaacggaacagaaactagaggagaagtaataaaacgaattatagacactataggacgagactattatgttaacggaaagtatttctctaaggttggtagtgcaggcttaaagcaattgactaataaattagatattaatgagtgcgcaactgtcgatgagttagttgatgagattaataaatccggaactgtaaaacgaaaaataaaaaaccaatcagcatttgatttaagcagagaatgtttgggatatccagaagcggattttataacgttagttaataacatgcggttcaaaatagaaaattgtaaggttgtaaatttcaatattgaaaatactaattgtttaaataacccgagtattgaaactatatatggaaactttaaccagttcgtctcaatctttaatgtcgtcaccgatgtcaaaaaaagattattcgagtgaaataatatgcgcctttgatataggtgcaaaaaatcctgccagaactgttttagaagtcaaggataactccgttagggtattggatatatcaaaattagactggagttctgattgggaaaggcgcatagctaaagatttgtcacaatatgaatacactacagttcttctagaacgtcagcctagaaggtcgccgtatgttaaatttatctattttattaaaggctttttatatcatacatcggctgccaaagttatttgcgtctcgcctgtcatgtctggtaattcatatagagatcgaaaaaagagatcggtcgaagcatttcttgattggatggacacattcggattgcgagactccgttccggatagacgcaaattagacgatgtagcggatagtttcaatttggctatgagatacgtattagataaatggaatactaattatacaccttataataggtgtaaatctagaaattacataaaaaaaatgtaataacgttagtaacgccattatggataatctatttacctttctacatgaaatagaagatagatatgccagaactatttttaactttcatctaataagttgcgatgaaataggagatatatatggtcttatgaaagaacgcatttcctcagaggatatgtttgataatatagtgtataataaagatatacatcctgccattaagaaactagtgtattgcgacatccaacttactaaacacattattaatcagaatacgtatccggtatttaacgattcttcacaagtgaaatgttgtcattatttcgacataaactcagataatagcaatattagctctcgtacagtagagatatttgagagggaaaagtcatctcttgtatcatatattaaaactaccaataagaagagaaaggtcaattacggcgaaataaagaaaactgttcatggaggcactaatgcaaattacttttccggtaaaaagtctgacgagtatctgagtactacagttagatccaacattaatcaaccttggatcaaaaccatctctaagaggatgagagttgatatcattaatcactctatagtaacgcgtggaaaaagctctatattacaaactatagaaattatttttactaatagaacatgtgtgaaaatattcaaggattctactatgcacattattctatccaaggacaaggatgaaaaggggtgtatacacatgattgacaaattattctatgtctattataatttatttctgttgttcgaagatatcatccaaaacgagtactttaaagaagtagctaatgttgtaaaccacgtactcacggctacggcattagatgagaaattattcctaattaagaaaatggctgaacacgatgtttatggagttagcaatttcaaaatagggatgtttaacctgacatttattaagtcgttggatcataccgttttcccctctctgttagatgaggatagcaaaataaagttttttaaggggaaaaagctcaatattgtagcattacgatctctggaggattgtataaattacgtgactaaatccgagaatatgatagaaatgatgaaggaaagatcgactattttaaatagcatagatatagaaacggaatcggtagatcgtctaaaagaattgcttctaaaatgaaaaaaaacactaattcagaaatggatcaacgactagggtataagtttttggtgcctgatcctaaagccggagttttttatagaccgttacatttccaatatgtatcgtattctaattttatattgcatcgattgcatgaaatcttgaccgtcaagcggccactcttatcgtttaagaataatacagaacgaattatgatagaaattagcaatgttaaagtgactcctccagattactcacctataatcgcgagtattaaaggtaagagttatgacgcattagccacgttcactgtaaatatctttaaagaggtaatgaccaaagagggtatatccatcactaaaataagtagttatgagggaaaagattctcatttgataaaaattccgctactaataggatacgggaataaaaatccacttgatacagccaagtatcttgttcctaatgtcataggtggagtctttatcaataaacaatctgtcgaaaaagtaggaattaatctagtagaaaagattacaacatggccaaaatttagggttgttaagccaaactcattcactttctcgttttcctccgtatcccctcctaatgtattaccgacaagatatcgccattacaagatatctctggatatatcacaattggaagcgttgaatatatcatcgacaaagacatttataacggtcaatattgttttgctgtctcaatatttatctagagtgagtctagaattcattagacgtagtttatcatacgatatgcctccagaagttgtctatctagtaaacgcgataatagatagtgctaaacgaattactgaatctattactgactttaatattgatacatacattaatgacctggtggaagctgaacacattaaacaaaaatctcagttaacgattaacgagttcaaatatgaaatgctgcataactttttacctcatatgaactatacacccgatcaactaaagggattttatatgatatctttactaagaaagtttctctactgtatcttccacacttctagatatccagatagagattcgatggtttgtcatcgcatcctaacgtacggcaaatattttgagacgttggcacatgatgaattagagaattacataggcaacatccgaaacgatatcatgaacaatcacaagaacagaggcacttacgcggtaaacattcatgtactaacaactcccggacttaatcacgcgttttctagcttattgagtggaaagttcaaaaagtcagacggtagttatcgaacacatcctcactattcatggatgcagaatatttctattcctaggagtgttggattttatccggatcaagtaaagatttcaaagatgttttctgtcagaaaataccatccaagtcaatatctttacttttgttcatcagacgttccggaaagaggtcctcaggtaggtttagtatctcaattgtctgtcttgagttccattacaaatatactaacgtctgagtatttggatttggaaaagaaaatttgtgagtatatcagatcatattataaagatgatataagttactttgaaacaggatttccaatcactatagaaaatgctctagtcgcatctcttaatccaaatatgatatgtgattttgtaactgactttagacgtagaaaacggatgggattcttcggtaacttggaggtaggtattactttagttagggatcacatgaatgaaattcgcattaatattggagcgggaagattagtcagaccattcttggttgtggataacggagagctcatgatggatgtgtgtccggagttagaaagcagattagacgacatgacattctctgacattcagaaagagtttccgcatgtcatcgaaatggtagatatagaacaatttacttttagtaacgtatgtgaatcggttcaaaaatttagaatgatgtcaaaggatgaaagaaagcaatacgatttatgtgactttcctgccgaatttagagatggatatgtagcatcttcactagtgggaatcaatcacaattctggacccagagctattcttggatgtgctcaagctaaacaagctatctcttgtctgagttcggatatacgaaataaaatagacaatggaattcatttgatgtatccagagaggccaatcgtgattagtaaggctttagaaacttcaaagattgcggctaattgcttcggccaacatgttactatagcattaatgtcgtacaaaggtatcaatcaagaggatggaattatcatcaaaaaacaatttattcagagaggcggtctcgatattgttacagccaagaaacatcaagtagaaattccattggaaaactttaataacaaagaaagagataggtctaacgcctattcaaaattagaaagtaatggattagttagactgaatgctttcttggaatccggagacgctatggcacgaaatatctcatcaagaactcttgaagatgattttgctagagataatcagattagcttcgatgtttccgagaaatataccgatatgtacaaatctcgcgttgaacgagtacaagtagaacttactgacaaagttaaggtacgagtattaaccatgaaagaaagaagacccattctaggagacaaatttaccactagaacgagtcaaaagggaacagtcgcgtatgtcgcggatgaaacggaacttccatacgacgaaaatggtatcacaccagatgtcattattaattctacatccatcttctctagaaaaactatatctatgttgatagaagttattttaacagccgcatattctgctaagccgtacaacaataagggagaaaaccgacctgtctgttttcctagtagtaacgaaacatccatcgatacatatatgcaattcgctaaacaatgttatgagcattcaaatccgaaattgtccgatgaagaattatcggataaaatcttttgtgaaaagattctctatgatcctgaaacggataagccttatgcatccaaagtattttttggaccaatttattacttgcgtctgaggcatttaactcaggacaaggcaaccgttagatgtagaggtaaaaagacgaagctcattagacaggcgaatgagggacgaaaacgtggaggaggtatcaagttcggagaaatggagagagactgtttaatagcgcatggtgcagccaatactattacagaagttttgaaagattcggaagaagattatcaagatgtgtatgtttgtgaaaattgtggagacatagcagcacaaatcaagggtattaatacatgtcttagatgttcaaaacttaatctctctcctctcttaacaaaaattgataccacgcacgtatctaaagtatttcttactcaaatgaacgccagaggcgtaaaagtcaaattagatttcgaacgaaggcctccttcgttttataaaccattagataaagttgatctcaagccgtcttttctggtgtaatattctagtttggtagtagatacatatcaatatcatcaaattcgagatccgaattataaaatgggcgtggattgttaactatagaatcggacgtctgatattcgaaaatctgtggagtttcaggttttggtggaggtgtaactgctacttgggatactgaagtctgatattcagaaagctgtggatgttctggttcggcatccaccgatggtgtcacatcactaatcggttcggtaacgtctgtggatggaggtgctacttctacagaacctgtagcctcagttgtcaacggagatacatttttaatgcgagaaaatgtataatttggtaatggtttcttatgtggatctgaagaagaggtaagatatctactagaaagataccgatcacgttctagttctcttttgtagaacttaactttttctttctccgcatctagttgatattccaacctcttcacgttactacgttcagattccaattcacgttcgcatgggttacctccgcagtttttacgagcgatttcacgttcagccttcatgcgtctctccctctctctatcgagtttatcagagcagtctttctgaaggcgatcgaactccataaatttctccaacgctttgattgtttccatagatttccgaagttcagcttttaggactgtgattctttttctttcgaattcacagctggatgtacaaccgtttccattaccgccatctctaagtttcttttctagatcggcaacatttcatccccatgccttttacattcctcgagtctactgtcgtcgaaatatcgttccagctccttttcgacatcaataactttagcacgttgtctctcaagctctcttttgtagttatctgattccctggcacgtttaagatcttcatgcaattgagtcagctcttaacttcctctcttgcttcttcgtcatagtacgcgcaatcactgtgagatccattgttaccacgtctacactcggcgagctcgcgtttaagagattcaatttcccgtttgtattggtccatgtttccattgctaccaccattagatttacaggctgctagttgtcgttcgagatcagaaatacgggttttcttggaattgatttcgtcgatgtacttggcatcgaaacacttattaagttctttttccaattctacgattttatttctttcgcgagtcaattccctcctgtagtaactatctgttttgtcagattcacgctctctacgtagactttcttgcaagttactaatttgttccctagcacgtccgagtttagttttatatgctgaatagagttctgattcatcctttgagcagatctctagcgatcgtttaagattcctaattctagtctttagcctatttacctcctcagaagatgttccgttaccgttgcgtttacactcgttaagctgtctatcaagatccatgattctatctctaagacgttgcatctctctttccatatcagcattgctttcattattacgtctgcagtcactcaactgtctttcaatatctgagattctatctctaagacgtcgcatctctctctgtttcggcattggtttcattattacgtctacagtcgttcaactgtctttcaagatctgatattctagattggagtctgctaatctctgtagcattttcacggcattcactcagttgtctttcaagatctgaaattttagattggagtctgctaatctctgtaagatttcctcctccgctctcgatgcagtcggtcaacttattctctagttctctaatacgcgaacgcagtgcatcaacttcttgcgtgtcttcctggttgcgtgtacattcatcgagtctagattcgagatctctaacgcgtcgtcgttcttcctcaagttctctgcgtactacagaaagcgtgtccttatcttgttgatatttagcaatttctgattctagagtactgattttgcttacgtagttactaatatttgtcttggccttatcaagatcctccttgtatttgtcgcattccttgatatccctacgaagtctggacagttcccattcgacattacgacgtttatcgatttcagctcggagatcgtcatcgcgttgttttagccacatacgactgagttcaagttctcgttgacaagatccatctacttttccattcctaatagtatccagttccttttctagttctgaacgcatttctcgttccctatcaagcgattctctcaattctcggatagtcttcttatcaatttctaataaatctgaaccatcatctgtcccattttgaatatccctgtgttctttgatctcttttgtaagtcggtcgattctttcggttttataaacagaatccctttccaaagtcctaatcttactgagtttatcactaagttctgcattcaattcggtgagttttctcttggcttcttccaactctgttttaaactctccactatttccgcattcttcctcgcatttatctaaccattcaattagtttattaataactagttggtaatcagcgattcctatagccgttcttgtaattgtgggaacataattaggatcttctaatggattgtatggcttgatagcatcatctttatcattattagggggatggacaaccttaattggttggtcctcatctcctccagtagcgtgtggttcttcaataccagtgttagtaataggcttaggcaaatgcttgtcgtacgcgggcacttcctcatccatcaagtatttataatcgggttctacttcagaatattcttttctaagagacgcgacttcgggagttagtagaagaactctgtttctgtatctatcaacgctggaatcaatactcaagttaaggatagcgaatacctcatcgtcatcatccgtatcttctgaaacaccatcatatgacatttcatgaagtctaacgtattgataaatagaatcagatttagtattaaacagatccttaacctttttagtaaacgcatatgtatattttagatctccagatttcataatatgatcacatgccttaaatgtcagtgcttccatgatataatctggaacactaatgggtgacgaaaaagatacagcaccatatgctacgttgataaataaatctgaaccactaagtagataatgattaatgttaagaaagaggaaatattcagtgtataggtatgtcttggcgtcatatcttgtactaaacacgctaaacagtttgttaatgtgatcaatttccaatagattaattagagcagcgggaataccaacaaacatattaccacatccgtattttctatgaatatcacatatcatgttaaaaaatcttgatagaagagcgaatatctcgtctgacttaatgagtcgtagttcagcagcaacataagtcataactgtaaatagaacatactttcctgtagtgttgattctagactccacatcaacaccattattaaaaatagttttatatacatctttaatctgctctccgttaatcgtcgaacgttctagtatacggaaacactttgatttcttatctgtagttaatgacttagtgatatcacgaagaatattacgaattacatttcttgtttttcttgagagacctgattcagaactcaactcatcgttccatagtttttctacctcagtggcgaaatctttggagtgcttggtacatttttcaataaggttcgtgacctccatttattataaaaaatttattcaaaacttaactacaatcgggtaattataaaatcgtagatctcccatgtggcggaatactaccatctatcgcatgtggatggacagtaggtaatggccatgggaacagtaatgtttgcatatttatctttcttgccagtattactgcatattgtcccaatgtttcgatgtgatgttctaacctatcaactgccgctgtatcacaacaatagtgtccgatgaaattaagattatgatccaatgtgtttaatatatgattatcaagtcttatacgatccgcgtcttttttgacaggatcaggttcttctacaggaagaagtttcggcctcttatgatattcatgtctgggaaacggtggtctagggtgaggctccggtatcggagtgggttttggattataatcatcatcgtctatgacatcatcttcgacttcgatatttattttgctatcttgatgatgtcctgtatcagttgcattttcagcactcgactgaatattagcgcattcattgtctattattaccatatttctaaacccaaaatgtatgtgttgaacatcagtactatcgttgatgagtcttatagcatgaattcgcttatcgttatcgggtttatcttctgtcaccttagcaattccttttttattaaactctacataatcatatccatttctattgtttgttctaatataaacgagtatagcatcattgctaaatttttcaatagtatcaaaaacagaatatcctaaaccatataatatatattcaggaacactcaaactaaatgtccaggattctcctaaatacgtaaactttaatagtgcgaaatcattcaaaaatctaccacttatagatagatagtacataaatgcgtatagtagtctacctatctctttattatgaaaaccggcattacgatcatatatgtcgtgatatacctgtgatccgtttacgttaaaccataaatacatgggtgatcctataaacatgaatttatttctaattctcagagctatagttaattgaccgtgtaatatttgcttacatgcatacttgatacgcttattaataagatttttatcattgctcgttatttcagaatcgtatatataaggagtaccatcgtgattcttaccagatattatacaaaatactatatataaaatatattgacccacgttagtaatcatataaatgtttaacgttttaaattttgtattcaatgatccattatcatacgctatcatggtcttgtaatattcattctttaaaatataatattgtgttagccattgcattggagctcctaatggagattttctattctcatccattttaggataggctttcataaagtccctaataacttcgtgaataatgtttctatgttttctactgatgcatgtatttgcttcgatttttttatcccatgtttcatctatcatagatttaaacgcagtaatgctcgcaacattaacatcttgaaccgttggtacaattccgttccataaatttataatgttcgccatttatataactcattttttgaatatacttttaattaacaaaagagttaagttactcatatggacgccgtccagtctgaacatcaatctttttagccagagatatcatagccgctcttagagtttcagcgtgattttccaacctaaatagaacttcatcgttgcgtttacaacacttttctatttgttcaaactttgttgttacattagtaatctttttttccaaattagttagccgttgtttgagagtttcctcattgtcgtcttcatcggctttaacaattgcttcgcgtttagcctctggctttttagcagcctttgtagaaaaaaattcagttgctggaattgcaagatcgtcatctccggggaaaagagttccgtccatttaaagtacagattttagaaactgacactctgcgttatttatatttggtacaacacatggattataaatattgatgttaataacatcagaaaatgtaaagtctatacattgttgcatcgtgttaaattttctaatggatctagtattattgggtccaacttctgcctgaaatccaaatatggaagcggatacaaaaccgtttcctggataaaccacacatctccacttttgctttacatcagaaattgtgtcgttgacatcttgaactctcctatctaatgccggtgttccacctatagattttgaatattcgaatgctgcatgagtagcattaaattccttaatattgccataattttcatatattgagtaaccctggataaaaagtaaacacaccgcagccgtcgctaccacaataaaaaaaattgatagagagttcatttataatctattagaagctgacaaaatttttttacacgcatcagacaatgctttaataaatagttcaacatctacttttgtcatatcgaaccgatggtatgattctaacctagaattacatccgaaaaagttgactatgttcatagtcattaagtcattaacaaacaacattccagactctggattataagacgatactgtttcgtcacaattacctaccttaatcatgtgattatgaatattggctattagagcaccttctaagaaatctataatatctttgaaacacgatttaaaatcaaaccacgaatatacttctacgaagaaagttagtttacccataggagaaataactataaatggagatctaaatacaaaatccggatctatgatagttttaacattattatattctctattaaatacctccacatctaaaaatgttaattttgaaactatgtcttcgtttattaccgtacctgaactaaacgctataagctctattgtttgagaactctttaaacgatattcttgaaatacatgtaacaaagtttcctttaactcggtcggtttatctaccatagttacagaatttgtatccttatctataatataataatcaaaatcgtataaagttatataattatcgcgttcagattgggatcttttcaaatagactaaaaaccccatttctctagtaagtatcttatgtatatgtttgtaaaatatcttcatggtgggaatatgctctaccgcagttagccattcctcattgacagcggtagatgtattagacaaaactattccaatgtttaacaagggccattttacgagattattaaatccttgtttgataaatgtagccaatgagggttcgagttcaacgacgattgaattctcttcccgcggatgctgcatgatgaacgacgggatgttgttcgattgatttggaattctttttcgactttttgtttatattaaatattttaaaatttatagcggatagcaattcatgtaccacggataatgtagacgcgtattgcgcatcgatatctttattattagataaatttatcaataaatgtgagaagtttgcctcgttaaggtcttccatttaaatattatataaacatttgtgtttgtaacttattcgtcttttatggaatagttttttactagtaaagctgcaattacacactttgtccgtaaaacataaatataaacaccagcttttatcaatcgttccaaaaagtcgacggcggacatttttaacatggcatctattttaaatacacttaggtttttggaaaaaacatcattttataattgtaacgattcaataactaaagaaaagattaagattaaacataagggaatgtcatttgtattttataagccaaagcattctaccgttgttaaatacttgtctggaggaggtatatatcatgatgatttggttgtattggggaaggtaacaattaataatctaaagatgatgctattttacatggatttatcatatcatggagtgacaagtagtggagcaatttacaaattgggatcgtctatcgatagactttctctaaataggactattgttacaaaagttaataattatgatgatacattttttgacgacgatgattgatcgctattgcacaattttgtttttgtactttctaatatagtgtttaggttctttttcatatgagaatattgatttactaaaatatctatgtttaacttttgttctatgacgtccttatcggcggtatcggtacatatacgtaattcaccttcacaaaatacggagtcttcgataataatagccaatcgattattggatctagctgtctgtatcatattcaacatgtttaatatatcctttcgtttcccctttacaggcatcgatcgtagcatattttccgcgtctgatatggaaatgttaaaactacaaaaatgcgtaatgttagcccgtcctaatattggtacgtgtctataagtttggcatagtagaataatagacgtgtttaaatgccttccaaagtttaagaattctattagagtattgcattttgatagtttatcgcctacatcatcaaaaataagtaaaaagtgtgctgattttttatgattttgtgcgacagcaatacatttttctatgttacttttagttcgtatcagattatattctagagattcctgactactaacgaaattaatatgatttggccaaatgtatccatcataatctgggttataaacgggtgtaaacaagaatatatgtttatattttttaactagtgtagaaaacagagatagtaaatagatagtttttccagatccagatcctcctgttaaaaccattctaaacggcatttttaataaattttctcttgaaaattgtttttcttggaaacaattcataattatatttacagttactaaattaatttgataataaatcaaaatatggaaaactaaggttgttagtagggaggagaacaaagaaggcacatcgtgatataaataacatttattatcatgatgacaccagaaaacgacgaagagcagacatctgtgttctccgctactgtttacggagacaaaattcagggaaagaataaacgcaaacgcgtgattggtctatgtattagaatatctatggttatttcactactatctatgattaccatgtccgcgtttctcatagtgcgcctaaatcaatgcatgtctgctaacgaggctgctattactgacgccgctgttgccgttgctgctgcatcatctactcatagaaaggttgcgtctagcactacacaatatgatcacaaagaaagctgtaatggtttatattaccagggttcttgttatatattacattcagactaccagttattctcggatgctaaagcaaattgcactgcggaatcatcaacactacccaataaatccgatgtcttgactacctggctcattgattatgttgaggatacatggggatctgatggtaatccaattacaaaaactacatccgattatcaagattctgatgtatcacaagaagttagaaagtatttttgtgttaaaacaatgaactaatatttatttttgtacattaataaatgaaatcgcttaatagacaaactgtaagtaggtttaagaagttgtcggtgccggccgctataatgatgatactctcaaccattattagtggcataggaacatttctgcattacaaagaagaactgatgcctagtgcttgcgccaatggatggatacaatacgataaacattgttatttagatactaacattaaaatgtctacagataatgcggtttatcagtgtcgtaaattacgagctagattgcctagacctgatactagacatctgagagtattgtttagtattttttataaagattattgggtaagtttaaaaaagaccaatgataaatggttagatattaataatgataaagatatagatattagtaaattaacaaattttaaacaactaaacagtacgacggatgctgaagcgtgttatatatacaagtctggaaaactggttaaaacagtatgtaaaagtactcaatctgtactatgtgttaaaaaattctacaagtgacaacaaaaaatgaattaataataagtcgttaacgtacgccgccatggacgccgcgtttgttattactccaatgggtgtgttgactataacagatacattgtatgatgatctcgatatctcaatcatggactttataggaccatacattataggtaacataaaaactgtccaaatagatgtacgggatataaaatattccgacatgcaaaaatgctactttagctataagggtaaaatagttcctcaggattctaatgatttggctagattcaacatttatagcatttgtgccgcatacagatcaaaaaataccatcatcatagcatgcgactatgatatcatgttagatatagaagataaacatcagccattttatctattcccatctattgatgtttttaacgctacaatcatagaagcgtataacctgtatacagctggagattatcatctaatcatcaatccttcagataatctgaaaatgaaattgtcgtttaattcttcattctgcatatcagacggcaatggatggatcataattgatgggaaatgcaatagtaattttttatcataaaagttgtaaagtaaataataaaacaataaatattgaactagtagtacgtatattgagcaatcagaaatgatgctggtacctcttatcacggtgaccgtagttgcgggaacaatattagtatgttatatattatatatttgtaggaaaaagatacgtactgtctataatgacaataaaattatcatgacaaaattaaaaaagataaagagttctaattccagcaaatctagtaaatcaactgatagcgaatcagactgggaggatcactgtagtgctatggaacaaaacaatgacgtagataatatttctaggaatgagatattggacgatgatagcttcgctggtagtttaatatgggataacgaatccaatgttatggcgcctagcacagaacacatttacgatagtgttgctggaagcacgctgctaataaataatgatcgtaatgaacagactatttatcagaacactacagtagtaattaatgaaacggagactgttgaagtacttaatgaagataccaaacagaatcctaactattcatccaatcctttcgtaaattataataaaaccagtatttgtagcaagtcaaatccgtttattacagaacttaacaataaatttagtgagaataatccgtttagacgagcacatagcgatgattatcttaataagcaagaacaagatcatgaacacgatgatatagaatcatcggtcgtatcattggtgtgattagtttcctttttataaaattgaagtaatatttagtattattgctgccgtcacgttgtacaaatggagatattccctgtattcggcatttctaaaattagcaattttattgctaataatgactgtagatattatatagatacagaacatcaaaaaattatatctgatgagatcaatagacagatggatgaaacggtacttcttaccaacatcttaagcgtagaagttgtaaatgacaatgagatgtaccatcttattcctcatagattatcgacgattatactctgtattagttctgtcggaggatgtgttatctctatagataatgacatcaatggcaaaaatattctaacctttcccattgatcatgctgtaatcatatccccactgagtaaatgtgtcgtagttagcaagggtcctacaaccatattggttgttaaagcggatatacctagcaaacgattggtaacatcgtttacaaacgacatactatatgtaaacaatctgtcactgattaattatttgccgttgtctgtattcattattagacgagtcaccgactatttggatagacacatatgcgatcagatatttgctaataataagtggtattcccttataaccatcgacgataagcaatatcctattccatcaaactgtataggtatgtcctctgccaagtacataaattctagcatcgagcaagatactttaatccatgtttgtaacctcgagcatccgttcgactcagtatacaaaaaaatgcagtcgtacaattctctacctatcaaggaacaaatattgtacggtagaattgataatataaatatgagcattagtatttctgtggattaatagatttctagtatggggatcattaatcatctctaatctctaaatacctcataaaacgaaaaaaaagctattatcaaatactgtacggaatggattcattctcttctctttttatgaaactctgttgtatatctactgataaaactggaagcaaaaaatctgatagaaagaataagaataagatcaaggattatatggaacacgattattataaaataacaatagttcctggttcctcttccacgtctactagctcgtggtattatacacatgcctagtaatagtctctttgcgttgacggaaagcagactagaaataacaggctaaaatgttcagacaccataatagttcccaacccagataataacagagttccatcaacacattcctttaaactcaatcccaaacccaaaaccgttaaaatgtatccggccaattgatagtagataatgaggtgtacagcgcatgataatttacacagtaaccaaaatgaaaatactttagtaattataagaaatatagacggtaatgtcatcatcaacaatccgataatatgcctgagagtaaacattgacggataaaacaaaaatgctccgcataactctatcatggcaataacacaaccaaatacttgtaagattcctaaattagtagaaaatacaacgaatatcgatgtataagtgatctcgagaaataataagaataaagtaatgcccgtaaagataaacatcaacattgtttggtaatcattaaaccaattagtatgaagttgaactaatttcacagtagattttattccagtgttatcctcgcatgtataagtacctggtaagatatctttatattccataatcaatgagacatcactatctgataacgaatgaagtctagcactagtatgccatttacttaatattgtcgtcttggaagttttattataagttaaaatatcatggttatccaatttccatctaatatactttgtcggattatctatagtacacggaataatgatggtatcattacatgctgtatactctatggtctttgtagttgttataacaaccaacgtatagaggtatatcaacgatattctaactcttgacattttttatttatttaaaatgatacctttgttatttattttattctattttgctaacggtattgaatggcataagtttgaaacgagtgaagaaataatttctacttacttattagacgacgtattatacacgggtgttaatggggcggtatacacattttcaaataataaactaaacaaaactggtttaactaataataattatataacaacatctataaaagtagaggatgcggataaggatacattagtatgcggaaccaataacggaaatcccaaatgttggaaaatagacggttcagacgacccaaaacatagaggtagaggatacgctccttatcaaaatagcaaagtaacgataatcagtcacaacggatgtgtactatctgacataaacatatcaaaagaaggaattaaacgatggagaagatttgacggaccatgtggttatgatttattcacggcggataacgtaattccaaaagatggtttacgaggagcattcgtcgataaagacggtacttatgacaaagtttacattcttttcactgatactatcggctcaaagagaattgtcaaaattccgtatatagcacaaatgtgcctaaacgacgaaggtggtccatcatcattgtctagtcatagatggtcgacgtttctcaaagtcgaattagaatgtgatatcgacggaagaagttatagacaaattattcattctagaactataaaaacagataatgatacgatactatatgtattcttcgatagtccttattccaagtccgcattatgtacctattctatgaataccattaaacaatctttttctacgtcaaaattggaaggatatacaaagcaattgccgtctccagctcctggtatatgtttaccagctggaaaagttgttccacataccacgtttgaagtcatagaacaatataatgtactagatgatattataaagcctttatctaaccaacctatcttcgaaggaccgtctggtgttaaatggttcgatataaaggagaaggaaaatgaacatcgggaatatagaatatacttcataaaagaaaattctatatattcgttcgatacaaaatctaaacaaactcgtagctcgcaagtcgatgcgcgactattttcagtaatggtaactgcgaaaccgttatttatagcagatatagggataggagtaggaatgccacaaatgaaaaaaatacttaaaatgtaatcttaatcgagtacaccacacgacaatgaacaaacataagacagattatgctggttatgcttgctgcgtaatatgcggtctaattgtcggaattatttttacagcgacactattaaaagttgtagaacgtaaattagttcatacaccattaatagataaaacgataaaagatgcatatattagagaagattgtcctactgactggataagctataataataaatgtatccatttatctactgatcgaaaaacctgggaggaaggacgtaatgcatgcaaagctctaaattcaaattcggatctaattaagatagagactccaaacgagttaagttttttaagaagccttagacgaggctattgggtaggagaatccgaaatattaaaccagacaaccccatataattttatagctaagaatgccacgaagaatggaactaaaaaacggaaatatatttgtagcacaacgaatactcccaaactgcattcgtgttacactatataacaattacactacatttttatcataccactacttcggttagatgttttagaaaaaaataaatatcgccgtaccgttcttgtttttataaaaataacaattaacaattatcaaattttttctttaatattttacgtggttgaccattcttggtggtaaaataatctcttagtgttggaatggaatgctgtttaatgtttccacactcatcgtatattttgacgtatgtagtcacatcgtttacgcaatagtcagactgtagttctatcatgcttcctacatcagaaggaggaacagttttaaagtctcttggttttaatctattaccgttagttttcatgaaatcctttgttttatccacttcacattttaaataaatgtccactatacattcttttgttaattttactagatcgtcatgggtcatagaatttataggttccgtagtccatggatccaaactagcaaacttcgcgtatacggtatcgcgattagtgtatacaccaactgtatgaaaattaagaaaacagtttaataaatcaacagaaatatttaatcctccgtttgatacagatgcgccatatttatggatttcggattcacacgttgtttgtctgaggtgttcgtctagtgttgcttctacgtaaacttcgattcccatatattctttattgtcagaatcgcataccgatttatcatcatacactgtttgaaaactaaatggtatacacatcaaaataataaataataacgagtacattctgcaatattgttatcgtaattggaaaaatagtgttcgagtgagttggattatgtgagtattggattgtatattttattttatattttgtaataagaataaaatgctaatgtcaagtttattccaatagatgtcttattaaaaacatatataataaataacaatggctgaatggcataaaattatcgaggatatctcaaaaaataataagttcgaggatgccgccatcgttgattacaagactacaaagaatgttctagctgctattcctaacagaacatttgccaagattaatccgggtgaaattattcctctcatcactaatcgtaatattctaaaacctcttattggtcagaaatattgtattgtatatactaactctctaatggatgagaacacgtatgctatggagttgcttactgggtacgcccctgtatctccgatcgttatagcgagaactcataccgcacttatatttttgatgggtaagccaacaacatccagacgtgacgtgtatagaacgtgtagagatcacgctacccgtgtacgtgcaactggtaattaaaataaaaagtaatattcatatgtagtgtcaattttaaatgatgatgatgaaatggataatatccatattgacgatgtcaataatgccggtattggcatacagttcatcgatttttagatttcattcagaggatgtggaattatgttatgggcatttgtattttgataggatctataatgtagtaaatataaaatataatccgcatattccatatagatataattttattaatcgcacgttaaccgtagatgaactagacgataatgtcttttttacacatggttattttttaaaacacaaatatggttcacttaatcctagtttgattgtctcattatcaggaaacttaaaatataatgatatacaatgctcagtaaatgtatcgtgtctcattaaaaatttggcaacgagtacatctactatattaacatctaaacataagacttattctctacatcggtccacgtgtattactataataggatacgattctattatatggtataaagatataaatgacaagtataatgacatctatgattttactgcaatatgtatgctaatagcgtctacattgatagtgaccatatacgtgtttaaaaaaataaaaatgaactcttaattatgctatgctattagaaatggataaaatcaaaattacggttgattcaaaaattggtaatgttgttaccatatcgtataacttggaaaagataactattgatgtcacacctaaaaagaaaaaagaaaaggatgtattattagcgcaatcagttgctgtcgaagaggcaaaagatgtcaaggtagaagaaaaaaatattatcgatattgaagatgacgatgatatggatgtagaaagcgcataatacgatctataaaaataagtatataaatactttttatttactgtactcttactgtgtagtggtgataccctactcgattatttttttaaaaaaaaaatacttattctgattcttctaaccatttccgtgttcgttcgaatgccacatcgacgtcaaagataggggagtagttaaaatctagttctgcattgttggtacacaccttaaatgtagtgttggatatcttcaacgtatagttgttgagtagtgatggttttctaaatagaattctcttcatatcattcttgcacgcgtacatttttagcatccatcttggaaaccttaactttcgaggttattggttgtggatcttctacaatatctatgactctgatttcttgaacatcatctgcactaattaacagttttactatatacctgcctagaaatccggcaccaccagtaaccgcgtacacggccattgctgccactcataatatcagactacttattctattttactaaataatggctgtttgtataatagaccacgataatatcagaggagttatttactttgaaccagtccatggaaaagataaagttttaggatcagttattggattaaaatccggaacgtatagtttgataattcatcgttacggagatattagtcaaggatgtgattccataggcagtccagaaatatttatcggtaacatctttgtaaacagatatggtgtagcatatgtttatttagatacagatgtaaatatatctacaattattggaaaggcgttatctatttcaaaaaatgatcagagattagcgtgtggagttattggtatttcttacataaatgaaaagataatacattttcttacaattaacgagaatggcgtttgatatatcagttaatgcgtctaaaacaataaatgcattagtttacttttctactcagcaaaataaattagtcatacgtaatgaagttaatgatacacactacactgtcgaatttgatagggacaaagtagttgacacgtttatttcatataatagacataatgacaccatagagataagaggggtgcttccagaggaaactaatattggttgcgcggttaatacgccggttagtatgacttacttgtataataagtatagttttaaactgattttagcagaatatataagacacagaaatactatatccggcaatatttattcggcattgatgacactagatgatttggctattaaacagtatggagacattgatctattatttaatgagaaacttaaagtagactccgattcgggactatttgactttgtcaactttgtaaaggatatgatatgttgtgattctagaatagtagtagctctatctagtctagtatctaaacattgggaattgacaaataaaaagtataggtgtatggcattagccgaacatatatctgatagtattccaatatctgagctatctagactacgatacaatctatgtaagtatctacgcggacacactgagagcatagaggataaatttgattattttgaagacgatgattcgtctacatgttctgccgtaaccgacagggaaacggatgtataattttttttatagcgtgaaggatatgataaaaaatataattgttgtatttatcccattccaatcaccttatatgattctgtaacacaataaaggagtcttatagatgtatagaggtcagatactggtttgataaactgtttattccacataagtatgtttgactttatggttagacccgcatactttaacaaatcactgaaaattggagttaggtattgacctctcagaatcagttgccgttctggaacattaaatgtattttttatgatatactccaacgcatttatgtgggcatacaacaagtcattactaatggaatattccaagagttttagttgtctagtatttaacaagagaagagatttcaacagactgtttatgaactcgaatgccgcctcattgtcgcttatattgatgatgtcgaattctcccaatatcatcaccgatgagtagctcatcttgttatcgggatccaagttttctaaagatgtcattaaaccctcgatcatgaatggatttatcatcatcgtttttatgttggacatgagcttagtccgtttgtccacatctatagaagatgatttctgaattatttcatatatctctctctttaactccaggaacttgtcaggatggtctactttaatatgttctcgtctaagagatgaaaatctttggatggttgcacgcgacttttctctaaaggatgacgttgcccaagatcctctcttaaatgaatccatcttatccttggacaagatggacagtctattttccttagatggtttaatatttttgttacccatgatctataaaggtagacctaatcgtctcggatgaccatatatttattttcagttttattatacgcataaattgtaaaaaatatgttaggtttacaaaaatgtctcgtggggcattaatcgtttttgaaggattggacaaatctggaaaaacaacacaatgtatgaacatcatggaatctataccggcaaacacgataaaatatcttaactttcctcagagatccactgtcactggaaaaatgatagatgactatctaactcgtaaaaaaacctataatgatcatatagttaatctattattttgtgcaaatagatgggagtttgcatcttttatacaagaacaactagaacagggaattactttaatagttgatagatacgcattttctggagtagcgtatgccgccgctaaaggcgcgtcaatgactctcagtaagagttatgaatctggattgcctaaacccgacttagttatattcttggaatctggtagcaaagaaattaatagaaacgtcggcgaggaaatttatgaagatgttacattccaacaaaaggtattacaagaatataaaaaaatgattgaagaaggagatattcattggcaaattatttcttctgaattcgaggaagatgtaaagaaggagttgattaagaatatagttatagaggctatacacacggttactggaccagtggggcaactgtggatgtaatagtgaaattacattttttataaatagatgttagtacagtgttataaatggatgaagcatattactctggcaacttggaatcagtactcggatacgtgtccgatatgcataccgaactcgcatcaatatctcaattagttattgccaagatagaaactatagataatgatatattaaacaaggacattgtaaattttatcatgtgtagatcaaacttggataatccatttatctctttcctagatactgtatatactattaaaaataactagttataagtttgaatccgtcaattttgattccaaaattgaatggactggggatggtctatacaatatatcccttaaaaattatggcatcaagacgtggcaaacaatgtatacaaatgtaccagaaggaacatacgacatatccgcatttccaaagaatgatttcgtatctttctgggttaaatttgaacaaggcgattataaagtggaagagtattgtacgggactatgcgtcgaagtaaaaattggaccaccgactgtaacattaactgaatacgacgaccatatcaatttgtacatcgagcatccgtatgctactagaggtagcaaaaagattcctatttacaaacgcggtgacatgtgtgatatctacttgttgtatacggctaacttcacattcggagattctaaagaaccagtaccatatgatatcgatgactacgattgcacgtctacaggttgcagcatagactttgtcacaacagaaaaagtgtgcgtgacagcacagggagccacagaagggtttctcgaaaaaattactccatggagttcgaaagtatgtctgacacctaaaaagagtgtatatacatgcgcaattagatccaaagaagatgttcccaatttcaaggacaaaatggccagagttatcaagagaaaatttaatacacagtctcaatcttatttaactaaatttctcggtagcacatcaaatgatgttaccacttttcttagcatgcttaacttgactaaatattcataattattttttattaatgatacaaaaacgaaataaaactgcatattatacactggttaacgcccttataggctctaaccattttcaagatgaggtccctgattatagtccttctgttcccctctatcatctactccatgtctattagacgatgtgagaagactgaagaggaaacatggggattgaaaatagggttgtgtataattgccaaagatttctatcccgaaagaactgattgcagtgttcatctcccaactgcaagtgaaggattgataactgaaggcaatggattcagggatatacgaaacaccgataaattataaaaaaagcaatgtgtccgctgtttccgttaataatactattttcgtaactggcggattattcataaataactctaatagcacgatcgtggacatttataaagacaaacaatggtcgattatagaaatggctagggtatatcacggcatcgactcgacatttggaatgttatattttgccggaggtctatccgttaccgaacaatatggtaatttagagaaaaacaacgagatatcttgttacaatcctagaacgaataagtggtttgatatttcatatactatttataagatatccatatcatcattgtgtaaactaaataacgtcttctatgtatttagtaaggacattggatatgtggaaaagtatgatggtgcatggaagttagtacatgatcgtctccccgctataaaggcattatcaacttctccttattgattgaaaatgaaaatataaatagtttttatgtatagcagtattaccctatagttttattgcttactactaacatggatacagatgttacaaatgtagaagatatcataaatgaaatagatagagagaaagaagaaatactaaaaaatgtagaaattgaaaataataaaaacattaacaagaatcatcccaatgaatatattagagaagcactcgttattaataccagtagtaatagtgattccattgataaagaagttatagaatgtatcagtcacgatgtaggaatatagatcatatctactaatttttataatcgatacaaaacataaaaaacaactcgttattacatagcaggcatggaatccttcaagtattgttttgataacgatggcaagaaatggattatcggaaatactttatattctggtaattcaatactctataaggtcagaaaaaatttcactagttcgttctacaattacgtaatgaagatagatcacaaatcacacaagccattgttgtctgaaatacgattctatatatctgtattggatcctttgactatcgacaactggacacgggaacgtggtataaagtatttggctattccagatctgtatggaattggagaaaccgatgattatatgttcttcgttataaagaattcgggaagagtattcgccccaaaggatactgaatcagtcttcgaagcatgcgtcactatgataaacacgttagagtttatacactctcgaggatttacccatggaaaaatagaaccgaggaatatactgattagaaataaacgtctttcactaattgactattctagaactaacaaactatacaagagtggaaactcacatatagattacaacgaggacatgataacttcaggaaatatcaattatatgtgtgtagacaatcatcttggagcaacagtttcaagacgaggagatttagaaatgttgggatattgcatgatagaatggttcggtggcaaacttccatggaaaaacgaaagtagtataaaagtaataaaacaaaaaaaagaatataaaaaatttatagctactttctttgaggactgttttcctgaaggaaatgaacctctggaattagttagatatatagaattagtatacacgttagattattctcaaactcctaattatgacagactacgtaaactgtttatacaagattgaaattatattcttttttttatagagtgtggtagtgttacggatatctaatattaatattagactatctctatcgcgctacacgaccaatatcgattactatggatatcttctatgaaaggagagaatgtatttatttctccagcgtcaatctcgtcagtattgacaatactgtattatggagctaatggatccactgctgaacagctatcaaaatatgtagaaacggaggagaacacggataaggttagcgctcagaatatctcattcaaatccatgaataaagtatatgggcgatattctgccgtgtttaaagattcctttttgagaaaaattggcgataagtttcaaactgttgacttcactgattgtcgcactatagatgcaatcaacaagtgtgtagatatctttactgaggggaaaatcaatccactattggatgaaccattgtctcctagcaattagtgccgtatactttaaagcaaaatggttgacgccattcgaaaaggaatttaccagtgattatcccttttacgtatctccgacggaaatggtagacgtaagtatgatgtctatgtacggcaaggcatttaatcacgcatctgtaaaagaatcattcggcaacttttcaatcatagaactgccatatgttggagatactagtatgatggtcattcttccagacaagattgatggattagaatccatagaacaaaatctaacagatacaaattttaagaaatggtgtgactttatggatgctatgtttatagatgttcacattcccaagtttaaggtaacaggctcgtataatctggtggatactctagtaaagtcaggactgacagaggtgttcggttcaactggagattatagcaatatgtgtaatttagatgtgagtgtcgacgctatgatccacaaaacgtatatagatgtcaatgaagagtatacagaagcagctgcagcaacttctgtactagtggcagactgtgcatcaacaattacaaatgagttctgtgcagatcatccgttcatctatgtgattaggcatgttgatggaaaaattcttttcgttggtagatattgctctccgacaactaattgttaaccattttttttaaaaaaaacaatgggtgatggatacacttgatggtataatgatgaatgaacgcgatgtttctgtaagcgttggcaccggaatactattcatggaaatgtttttccgttacaataaaaatagtatcaacaatcaactaatgtatgatataattaatagcgtatctataagtgtagctaattatagatatagaagctgcttttaacgacgatggtatatacatccgtagaaatatgattaacaagttgtacggatacgcatctctaactactattggcacgatcgctggaggtgtttgttattatctgttgatgcatctagttagtttgtataaataattatttcaatatactagttaaaattttaagattttaaatgtataaaaaactaataacgtttttatttgtaataggtgcattagcatcctattcgaataatgagtacactccgtttaataaactgagtgtaaaactctatatagatggagtagataatatagaaaattcatatactgatgataataatgaattggtgttaaattttaaagagtacacaatttctattattacagagtcatgcgacgtcggatttgattccatagatatagatgttataaacgactataaaattattgatatgtataccattgactcgtctactattcaacgcagaggtcacacgtgtagaatatctaccaaattatcatgccattatgataagtacccttatattcacaaatatgatggtgatgagcgacaatattctattactgcagagggaaaatgctataaaggaataaaatatgaaataagtatgatcaacgatgatactctattgagaaaacatactcttaaaattggatctacttatatatttgatcgtcatggacatagtaatacatattattcaaaatatgatttttaaaaatttaaaatatattatcacttcagtgacagtagtcaaataacaaacaacaccatgagatatattataattctcgcagttttgttcattaatagtatacacgctaaaataactagttataagtttgaatccgtcaattttgattccaaaattgaatggactggggatggtctatacaatatatcccttaaaaattatggcatcaagacgtggcaaacaatgtatacaaatgtaccagaaggaacatacgacatatccgcatttccaaagaatgatttcgtatctttctgggttaaatttgaacaaggcgattataaagtggaagagtattgtacgggactatgcgtcgaagtaaaaattggaccaccgactgtaacattgactgaatacgacgaccatatcaatttgtacatcgagcatccgtatgctactagaggtagcaaaaagattcctatttacaaacgcggtgacatgtgtgatatctacttgttgtatacggctaacttcacattcggagattctaaagaaccagtaccatatgatatcgatgactacgattgcacgtctacaggttgcagcatagactttgtcacaacagaaaaagtgtgcgtgacagcacagggagccacagaagggtttctcgaaaaaattactccatggagttcgaaagtatgtctgacacctaaaaagagtgtatatacatgcgcaattagatccaaagaagatgttcccaatttcaaggacaaaatggccagagttatcaagagaaaatttaatacacagtctcaatcttatttaactaaatttctcggtagcacatcaaatgatgttaccacttttcttagcatgcttaacttgactaaatattcataactaatttttattaatgatacaaaaacgaaataaaactgcatattatacactggttaacgcccttataggctctaaccattttcaagatgaggtccctgattatagtccttctgttcccctccatgtctattagacgatgtgagaagactgaagaggaaacatggggattgaaaatagggttgtgtataattgccaaagatttttatcccgaaagaactgattgcagtgttcatctcccaactgcaagtgaaggattgataactgaaggcaatggattcagggatatacgaaacaccgataaattataaaaaaagcaatgtgtccgctgtttccgttaataatactattttcgtaactggcggattattcataaataactctaatagcacgatcgtggacatttataaagacaaacaatggtcgattatagaaatggctagggtatatcacggcatcgactcgacatttggaatgttatattttgccggaggtctatccgttaccgaacaatatggtaatttatagaaaaacaacgagatatcttgttacaatcctagaacgaataagtggtttgatatttcatatactatttataagatatccatatcatcattgtgtaaactaaataacgtcttctatgtatttagtaaggacattggatatgtggaaaagtatgatggtgcatggaagttagtacatgatcgtctccccgctataaaggcattatcaacttctccttattgattgaaaatgaaaatataaatagtttttatgtatagcagtattaccctatagttttattgcttactactaacatggatacagatgttacaaatgtagaagatatcataaatgaaatagatagagagaaagaagaaatactaaaaaatgtagaaattgaaaataataaaaacattaacaagaatcatcccaatgaatatattagagaagcactcgttattaataccagtagtaatagtgattccattgataaagaagttatagaatgtatcagtcacgatgtaggaatatagatcatatctactaatttttataatcgatacaaaacataaaaaacaactcgttattacatagcaggcatggaatccttcaagtattgttttgataacgatggcaagaaatggattatcggaaatactttatattctggtaattcaatactctataaggtcagaaaaaatttcactagttcgttctacaattacgtaatgaagatagatcacaaatcacacaagccattgttgtctgaaatacgattctatatatctgtattggatcctttgactatcgacaactggacacgggaacgtggtataaagtatttggctattccagatctgtatggaattggagaaaccgatggattatatgttcttcgttataaagaattcgggaagagtattcgccccaaaggatactgaatcagtcttcgaagcatgcgtcactatgataaacacgttagagtttatacactctcgaggatttacccatggaaaaatagaaccgaggaatataatattaaaacttaccacgtaaaacttaaaatttaaaatgatatttcattgacagatagatcacacattatgaactttcaaggacttgtgttaactgacaattgcaaaaatcaatgggtcgttggaccattaataggaaaaggtggatttggtagtatttatactactaatgacaataattatgtagtaaaaatagagcccaaagctaacggatcattatttaccgaacaggcattttatactagagtacttaaaccatccgttatcgaagaatggaaaaaatctcacaatataaagcacgtaggtcttatcacgtgcaaggcatttggtctatacaaatccattaatgtggaatatcgattcttggtaattaatagattaggtgcagatctagatgcggtgatcagagccaataataatagactaccaaaaaggtcggtgatgttgatcggaatcgaaatcttaaataccatacaatttatgcacgagcaaggatattctcacggagatattaaagcgagtaatatagtcttagatcaaatagataagaataaattatatctagtggattacggattggtttctaaattcatgtctaatggcgaacatgttccatttataagaaatccaaataaaatggataacggtactctagaatttacacctatagattcgcataaaggatacgttgtatctagacgtggagatctagaaacacttggatattgtatgattagatggttgggaggtatcttaccatggactaagatatctgaaacaaagaattgtgcattagtaagtgccacaaaacagaaatatgttaacaatactgcgactttgttaatgaccagtttgcaatatgcacctagagaattgctgcaatatattaccatggtaaactctttgacatattttgaggaacccaattacgacaagtttcggcacatattaatgcagggtgtatattattaagtgtggtgtttggtcgataaaaattaaaaaataacttaatttattattgatctcgtgtgtacaaccgaaatcatggcgatgttttacgcacacgctctcggtgggtacgacgagaatcttcatgcctttcctggaatatcatcgactgttgccaatgatgtcaggaaatattctgttgtgtcagtttataataacaagtatgacattgtaaaagacaaatatatgtggtgttacagtcaggtgaacaagagatatattggagcactgctgcctatgtttgagtgcaatgaatatctacaaattggaaatccgatccatgatcaagaaggaaatcaaatctctatcatcacatatcgccacaaaaactactatgctctaagcggaatcgggtacgagagtctagacttgtgtttggaaggagtagggattcatcatcacgtacttgaaacaggaaacgctgtatatggaaaagttcaacatgattattctactatcaaagagaaggccaaagaaatgagtgcacttagtccaggacctatcatcgattaccacgtctggataggagattgtatctgtcaagttactgctgtggacgtacatggaaaggaaattatgaaaatgagattcaaaaagggtgcggtgcttccgatcccaaatctggtaaaagttaaacttggggagaatgatacagaaaatctttcttctactatatcggcgacaccatcgaggtaaccacctctctggaagacagcgtgaataatgtactcatgaaacgtttggaaactatacgccatatgtggtctgttgtatatgatcattttgatattgtgaatggtaaagaatgctgttatgtgcatacgcatttgtctaatcaaaatcttataccgagtactgtaaaaacaaatttgtacatgaagactatgggatcatgcattcaaatggattccatggaagctctagagtatcttagcgaactgaaggaatcaggtggatggagtcccagaccagaaatgcaggaatttgaatatccagatggagtggaagacactgaatcaattgagagattggtagaggagttcttcaatagatcagaacttcaggctggtgaatcagtcaaatttggtaattctattaatgttaaacatacatctgtttcagctaagcaactaagaacacgtatacggcagcagcttccttctatactctcatcttttaccaacacaaagggtggatatttgttcattggagttgataataatacacacaaagtatttggattcacggtgggttacgactacctcagactgatagagaatgatatagaaaagcatatcaaaagactttgtgttgtgtatttctgtgagaagaaagaggacatcaagtacgcgtgtcgattcatcaaggtatataaacctggggatgaggctacctcgacatacgtgtgcgctatcaaagtggaaagatgctgttgtgctgtgtttgcagattggccagaatcatggtatatggatactaatggtatcaagaagtattctccagatgaatgggtgtcacatataaaattttaattaatgtaactatagagaacaaataataaggttgtaatatcatatagacaataactaacaattaattagtaactgttatctcttttttaattaaccaactaactatatacctattaatacatcgtaattatagttcttaacatctattaatcattaattcgcttctttaattttttataaactaacattgttaattgaaaagggataacatgttacagaatataaattatatatggatttttttaaaaaggaaatacttgactggagtatatatttatctcttcattatatagcacgcgtgttttccaatttttccacatcccatataatacaggattataatctcgttcgaacatacgagaaagtggataaaacaatagttgattttttatctaggttgccaaatttattccatattttagaatatggggaaaatattctacatatttattctatggatgatgctaatacgaatattataattttttttctagatagagtattaaatattaataagaacgggtcatttatacacaatctcgggttatcatcatccattaatataaaagaatatgtatatcaattagttaataatgatcatccagataataggataagactaatgcttgaaaatggacgtagaacaagacattttttgtcctatatatcagatacagttaatatctatatatgtattttaataaatcatggattttatatagatgccgaagacagttacggttgtacattattacatagatgtatatatcactataagaaatcagaatcagaatcatacaatgaattaattaagatattgttaaataatggatcagatgtagataaaaaagatacgtacggaaacacaccttttatcctattatgtaaacacgatatcaacaacgtggaattgtttgagatatgtttagagaatgctaatatagactctgtagactttaatagatatacacctcttcattatgtctcatgtcgtaataaatatgattttgtaaagttattaatttctaaaggagcaaatgttaatgcgcgtaataaattcggaactactccattttattgtggaattatacacggtatctcgcttataaaactatatttggaatcagacacagagttagaaatagataatgaacatatagttcgtcatttaataatttttgatgctgttgaatctttagattatctattatccagaggagttattgatattaactatcgtactatatacaacgaaacatctatttacgacgctgtcagttataatgcgtataatacgttggtctatctattaaacaaaaatggtgattttgagacgattactactagtggatgtacatgtatttcggaagcagtcgcaaacaacaacaaaataataatggaagtactattgtctaaacgaccatctttgaaaattatgatacagtctatgatagcaattactaaacataaacagcataatgcagatttattgaaaatgtgtataaaatatactgcgtgtatgaccgattatgatactcttatagatgtacagtcgctacagcaatataaatggtatattttaagatgtttcgatgaaatagatatcatgaagagatgttatataaaaaataaaactgtattccaattagttttttgtatcaaagacattaatactttaatgagatacggtaaacatccttctttcgtgaaatgcactagtctcgacgtatacggaagtcgtgtacgtaatatcatagcatctattagatatcgtcagagattaattagtctattatccaagaagctggatcctggagataaatggtcgtgttttcctaacgaaataaaatataaaatattggaaaactttaacgataacgaactatccacatatctaaaaatcttataaacattattaaaatataaaatctaagtaggataaaatcacactacatcattgtttccttttagtgctcgacagtgtatactatttttaacgctcataaataaaaatgaaaacgatttccgttgttacgttgttatgcgtactacctgctgttgtttattcaacatgtactgtacccactatgaataacgctaaattaacgtctaccgaaacatcgtttaatgataaccagaaagttacgtttacatgtgatcagggatatcattctttggatccaaatgctgtctgtgaaacagataaatggaaatacgaaaatccatgcaaaaaaatgtgcacagtttctgattatgtctctgaactatataataaaccgctatacgaagtgaattccaccatgacactaagttgcaacggcgaaacaaaatattttcgttgcgaagaaaaaaatggaaatacttcttggaatgatactgttacgtgtcctaatgcggaatgtcaacctcttcaattagaacacggatcgtgtcaaccagttaaagaaaaatactcatttggggaatatatgactatcaactgtgatgttggatatgaggttattggtgcttcgtacataagttgtacagctaattcttggaatgttattccatcatgtcaacaaaaatgtgatatgccgtctctatctaacggattaatttccggatctacattttctatcggtggcgttatacatcttagttgtaaaagtggttttacactaacggggtctccatcatccacatgtatcgacggtaaatggaatcccatactcccaatatgtgtacgaactaacgaaaaatttgatccagtggatgatggtcccgacgatgagacagatttgagcaaactctcgaaagacgttgtacaatatgaacaagaaatagaatcgttagaagcaacttatcatataatcatagtggcgttgacaattatgggcgtcatatttttaatctccgttatagtattagtttgttcctgtgacaaaaataatgaccaatataagttccataaattgctaccgtaaatataaatccgttaaaataattaataatttaataacaaacaagtatcaaaagattaaagacttatagctagaatcaattgagatgtcttcttcagtggatgttgatatctacgatgccgttagagcatttttactcaggcactattataacaagagatttattgtgtatggaagaagtaacgccatattacataatatatacaggctatttacaagatgcgccgttataccgttcgatgatatagtacgtactatgccaaatgaatcacgtgttaaacaatgggtgatggatacacttaatggtataatgatgaatgaacgcgatgtttctgtaagcgttggcaccggaatactattcatggaaatgtttttcgattacaataaaaatagtatcaacaatcaactaatgtatgatataattaatagcgtatctataattctagctaatgagagatatagaagcgcttttaacgacgatggtatatacatccgtagaaatatgattaacaagttgtacggatacgcatctctaactactattggcacgatcgctggaggtgtttgttattatctgttgatgcatctagttagtttgtataaataattatttcaatatactagttaaaattttaagattttaaatgtataaaaaactaataacgtttttatttgtaataggtgcattagcatcctattcgaataatgagtacactccgtttaataaactgagtgtaaaactctatatagatggagtagataatatagaaaattcatatactgatgataataatgaattggtgttaaattttaaagagtacacaatttctattattacagagtcatgcgacgtcggatttgattccatagatatagatgttataaacgactataaaattattgatatgtataccattgactcgtctactattcaacgcagaggtcacacgtgtagaatatctaccaaattatcatgccattatgataagtacccttatattcacaaatatgatggtgatgagcgacaatattctattactgcagagggaaaatgctataaaggaataaaatatgaaataagtatgatcaacgatgatactctattgagaaaacatactcttaaaattggatctacttatatatttgatcgtcatggacatagtaatacatattattcaaaatatgatttttaaaaatttaaaatatattatcacttcagtgacagtagtcaaataacaaacaacaccatgagatatattataattctcgcagttttgttcattaatagtatacatgctaaaataactagttataagtttgaatccgtcaattttgattccaaaattgaatggactggggatggtctatacaatatatcccttaaaaattatggcatcaagacgtggcaaacaatgtatacaaatgtaccagaaggaacatacgacatatccgcatttccaaagaatgatttcgtatctttctgggttaaatttgaacaaggcgattataaagtggaagagtattgtacgggactatgcgtcgaagtaaaaattggaccaccgactgtaacattgactgaatacgacgaccataaacagaaaaagtgtgcgtgacagcacagggagccacagaagggtttctcgaaaaaattactccatggagttcgaaagtatgtctgacacctaaaaagagtgtatatacatgcgcaattagatccaaagaagatgttcccaatttcaaggacaaaatggccagagttatcaagagaaaatttaatacacagtctcaatcttatttaactaaatttctcggtagcacatcaaatgatgttaccacttttcttagcatgcttaacttgactaaatattcataactaatttttattaatgatacaaaaacgaaataaaactgcatattatacactggttaacgcccttataggctctaaccattttcaagatgaggtccctgattatagtccttctgttcccctctatcatctactccatgtctattagacgatgtgagaagactgaagaggaaacatggggattgaaaatagggttgtgtataattgccaaagatttctatcccgaaagaactgattgcagtgttcatctcccaactgcaagtgaaggattgataactgaaggcaatggattcagggatatacgaaacaccgataaattataaaaaaagcaatgtgtccgctgtttccgttaataatactattttcgtaactggcggattattcataaataactctaatagcacgatcgtggttaacaatatggaaaaacttgacatttataaagacaaacaatggtcgattatagaaatgcctatggctagggtatatcacggcattgactcgacatttggaatgttatattttgccggaggtctatccgttaccgaacaatatggtaatttagagaaaaacaacgagatatcttgttacaatcctagaacgaataagtggtttgatatttcatatactatttataagatatccatatcatcattgtgtaaactaaataacgtcttctatgtatttagtaaggacattggatatgtggaaaagtatgatggtgcatggaagttagtacatgatcgtctccccgctataaaggcattatcaacttctccttattgattgaaaatataaatagtttttatgtatagcagtattaccctatagttttattgcttactactaacatggatacagatgttacaaatgtagaagatatcataaatgaaatagatagagagaaagaagaaatactaaaaaatgtagaaattgaaaataataaaaacattaacaagaatcatcccaatgaatatattagagaagcactcgttattaataccagtagtaatagtgattccattgataaagaagttatagaatgtatcagtcacgatgtaggaatatagatcatatctactaatttttataatcgatacaaaacataaaaaacaactcgttattacatagcaggcatggaatccttcaagtattgttttgataacgatggcaagaaatggattatcggaaatactttatattctggtaattcaatactctataaggtcagaaaaaatttcactagttcgttctacaattacgtaatgaagatagatcacaaatcacacaagccattgttgtctgaaatacgattctatatatctgtattggatcctttgactatcgacaactggacacgggaacgtggtataaagtatttggctattccagatctgtatggaattggagaaaccgatgattatatgttcttcgttataaagaattcgggaagagtattcgccccaaaggatactgaatcagtcttcgaagcatgcgtcactatgataaacacgttagagtttatacactctcgaggatttacccatggaaaaatagaaccgaggaatatactgattagaaataaacgtctttcactaattgactattctagaactaacaaactatacaagagtggaaactcacatatagattacaacgaggacatgataacttcaggaaatatcaattatatgtgtgtagacaatcatcttggagcaacagtttcaagacgaggagatttagaaatgttgggatattgcatgatagaatggttcggtggcaaacttccatggaaaaacgaaagtagtataaaagtaataaaacaaaaaaaagaatataaaaaatttatagctactttctttgaggactgttttcctgaaggaaatgaacctctggaattagttagatatatagaattagtatacacgttagattattctcaaactcctaattatgacagactacgtaaactgtttatacaagattgaaattatattcttttttttatagagtgtggtagtgttacggatatctaatattaatattagactatctctatcgcgctacacgaccaatatcgattactatggatatcttctatgaaaggagagaatgtatttatttctccagcgtcaatctcgtcagtattgacaatactgtattatggagctaatggatccactgctgaacagctatcaaaatatgtagaaacggaggagaacacggataaggttagcgctcagaatatctcattcaaatccatgaataaagtatatgggcgatattctgccgtgtttaaagattcctttttgagaaaaattggcgataagtttcaaactgttgacttcactgattgtcgcactatagatgcaatcaacaagtgtgtagatatctttactgaggggaaaatcaatccactattggatgaaccattgtctcctagcaattagtgccgtatactttaaagcaaaatggttgacgccattcgaaaaggaatttaccagtgattatcccttttacgtatctccgacggaaatggtagacgtaagtatgatgtctatgtacggcaaggcatttaatcacgcatctgtaaaagaatcattcggcaacttttcaatcatagaactgccatatgttggagatactagtatgatggtcattcttccagacaagattgatggattagaatccatagaacaaaatctaacagatacaaattttaagaaatggtgtgactttatggatgctatgtttatagatgttcacattcccaagtttaaggtaacaggctcgtataatctggtggatactctagtaaagtcaggactgacagaggtgttcggttcaactggagattatagcaatatgtgtaatttagatgtgagtgtcgacgctatgatccacaaaacgtatatagatgtcaatgaagagtatacagaagcagctgcagcaacttctgtactagtggcagactgtgcatcaacaattacaaatgagttctgtgcagatcatccgttcatctatgtgattaggcatgttgatggaaaaattcttttcgttggtagatattgctctccgacaactaattgttaaccattttttttaaaaaaaatagaaaaaacatgtggtattagtgcaggtcgttgttcttccaattgcaattggtaagatgacggccaactttagtacccacgtcttttcaccacagcactgtggatgtgacagactgaccagtattgatgacgtcaaacaatgtttgactgaatatatttattggtcgtcctatgcataccgcaacaggcaatgcgctggacaattgtattccacactcctctcttttagagatgatgcggaattagtgttcatcgacattcgcgagctggtaaaaaatatgccgtgggatgatgtcaaagattgtacagaaatcatccgttgttatataccggatgagcaaaaaaccatcagagagatttcggccatcatcggactttgtgcatatgctgctacttactggggaggtgaagaccatcccactagtaacagtctgaacgcattgtttgtgatgcttgagatgctaaattacgtggattataacatcatattccggcgtatgaattgatgagttgtacatcttgacattttctttcttctcttctccctttcttctcttctcccttcctccctcttctccctttcccagaaacaaacttttttacccactataaaataaaatgagtatactacctgttatatttctttctatatttttttattcttcattcgttcagacttttaacgcgtctgaatgtatcgacaaagggcaatattttgcatcattcatggagttagaaaacgagccagtaatcttaccatgtcctcaaataaatacgctatcatccggatataatatattagatattttatgggaaaaacgaggagcggataatgatagaattataccgatagataatggtagcaatatgctaattctgaacccgacacaatcagactctggtatttatatatgcattaccacgaacgaaacctactgtgacatgatgtcgttaaatttgacaatcgtgtctgtctcagaatcaaatatagattttatctcgtatccacaaatagtaaatgagagatctactggcgaaatggtatgtcccaatattaatgcatttattgctagtaacgtaaacgcagatattatatggagcggacatcgacgccttagaaataagagacttaaacaacggacacctggaattattaccatagaagatgttagaaaaaatgatgctggttattatacatgtgttttagaatatatatacggtggcaaaacatataacgtaaccagaattgtaaaattagaggtacgggataaaataataccttctactatgcaattaccagatggcattgtaacttcaataggtagtaatttgactattgcatcgttgagacctcccacaacggatgcagacgtcttttggataagtaatggtatgtattacgaagaagatgatggggacggaaacggtagaataagtgtagcaaataaaatctatatgaccgataagagacgtgttattacatcccggttaaacattaatcctgtcaaggaagaagatgctacaacgtttacgtgtatggcgtttactattcctagcatcagcaaaacagttactgttagtataacgtgaatgtatgttgttacatttccatgtcaattgagtttataagaatttttatacattatcttccaacaaacaattgacgaacgtattgctatgattaactcccacgatactatgcatattattaatcattaacttgcagactatacctagtgctattttgacatactcatgttcttgtgtaattgcggtatctatattattaaagtacgtaaatctagctatagttttattatttaattttagataatataccgtctccttatttttaaaaattgccacatcctttattaaatcatgaatgggaatttctatgtcatcgttagtatattgtgaacaacaagagcagatatctataggaaagggtggaatgcgatacattgatctatgtagttttaaaacacacgcgaactttgaagaatttatataaatcattccatcgatacatccttctatgttgagatgtatatatccaggaattcgtttattaatatcgggaaatgtataaactaaaacattgcccgaaagcggtgcctctatctgcgttatatccgttcttaacttacaaaatgtaaccaatacctttgcatgacttgttttgttcggcaacgttagtttaaacttgacgaatggattaattacaatagcatgatccgcgcatctattaagtttttttactttaacgcccttgtatgtttttacagagactttatctaaatttctagtgcttgtatgtgttataaatataacgggatatagaaccgaatcacctaccttagatacccaattacattttatcagatccagataataaacaaattttgtcgccctaactaattctatattgttatatattttacaattggttatgatatcatgtaataacttggagtctaacgcgcatcgtcgtacgtttatacaattgtgatttagtgtagtatatctacacatgtatttttccgcactatagtattctggactagtgataaaactatcgttatatctatcttcaatgaactcatcgagatattgctctctgtcatattcatacacctgcataaactttctagacatcttacaatccgtgttattttaggatcatatttacatatttacgggtatatcaaagatgttagattagttaatgggaatcgtctataataatgaatattaaacaattatatgaggacttttaccacaaagcatcataaaaatgagtcgtcgtctgatttatgttttaaatatcaaccgcaaatcaactcataaaatacaagagaatgaaatatatacatattttagtcattgcaatatagaccatacttctacagaacttgattttgtagttaaaaactatgatctaaacagacgacaacctgtaactgggtatactgcactacactgctatttgtataataattactttacaaacgatgtactgaagatattattaaatcatggagtggatgtaacgatgaaaaccagtagcggacgtatgcctgtttatatattgcttactagatgttgtaatatttcacatgatgtagtgatagatatgatagacaaagataaaaaccacttattacatagagactattccaacctattactagagtatataaaatctcgttacatgttattaaaggaagaggatatcgatgagaacatagtatccactttattagataagggaatcgatcctaactttaaacaagacggatatacagcgttacattattattatttgtgtctcgcacacgtttataaaccaggtgagtgtagaaaaccgataacgataaaaaaggccaagcgaattatttctttgtttatacaacatggagctaatctaaacgcgttagataattgtggtaatacaccattccatttgtatcttagtattgaaatgtgtaataatattcatatgactaaaatgctgttgacttttaatccgaatttcgaaatatgtaataatcatggattaacgcctatactatgttatataacttccgactacatacaacacgatattcttgttatgttaatacatcactatgaaacaaatgttggagaaatgccgatagatgagcgtcgtatgatcgtattcgagtttatcaaaacatattctacacgtccggcagattcgataacttatttgatgaataggtttaaaaatataaatatttatacccgctatgaaggaaagacattattacacgtagcatgtgaatataataatacacacgtaatagattatcttatacgtatcaacggagatataaatgcgttaaccgacaataacaaacacgctacacaactcattatagataacaaagaaaattccccatataccattaattgtttactgtatatacttagatatattgtagataagaatgtgataagatcgttggtggatcaacttccatctctacctatcttcgatataaaatcatttgagaaattcatatcctactgtatacttttagatgacacattttacgataggcacgttaagaatcgcgattctaaaacgtatcgatacgcattttcaaaatacatgtcgtttgataaatacgatggtataataactaaatgtcacgacgaaacaatgttactcaaactgtccactgttctagacactacactatatgcagttttaagatgtcataattcgagaaagttaagaagatacctcaacgagttaaaaaaatataataacgataagtcctttaaaatatattctaatattatgaatgagagataccttaatgtatattataaagatatgtacgtgtcaaaggtatatgataaactatttcctgttttcacagataaaaattgtctactaacattactaccttcagaaattatatacgaaatattatacatgctgacaattaacgatctttataatatatcgtatccacctaccaaagtatagttgtatttttctcatgcgatgtgtgtaaaaaaactgatattatataaatattttagtgccgtataataaagatgacgatgaaaatgatggtacatatatatttcgtatcattattgttattgctattccacagttacgccatagacatcgaaaatgaaatcacagaattcttcaataaaatgagagatactctaccagctaaagactctaaatggttgaatccagcatgtatgttcggaggcacaatgaatgatatagccgctctaggagagccattcagcgcaaagtgtcctcctattgaagacagtcttttatcgcacagatataaagactatgtggttaaatgggagaggctagaaaagaatagacggcgacaggtttctaataaacgtgttaaacatggtgatttatggatagccaactatacatctaaattcagtaaccgtaggtatttgtgcaccgtaactacaaagaatggtgactgtgttcagggtatagttagatctcatattaaaaaacctccttcatgcattccaaaaacatatgaactaggtactcatgataagtatggcatagacttatactgtggaattctttacgcaaaacattataataatataacttggtataaagataataaggaaattaatatcgacgacattaagtattcacaaacgggaaaggaattaattattcataatccagagttagaagatagcggaagatacgactgttacgttcattacgacgacgttagaatcaagaatgatatcgtagtatcaagatgtaaaatacttacggttataccgtcacaagaccacaggtttaaactaatactagatccgaaaatcaacgtaacgataggagaacctgccaatataacatgcactgctgtgtcaacgtcattattgatcgacgatgtactgattgaatgggaaaatccatccggatggcttataggattcgattttgatgtatactctgttttaactagtagaggcggtatcaccgaggcgaccttgtactttgaaaatgttactgaagaatatataggtaatacatataaatgtcgtggacacaactattattttgaaaaaacccttacaactacagtagtattggagtaaatatacaatgcatttttatatacattactgaattattattactgaattattattactgaattattattaattatatcgtatttgtgctatagaatggatgaagatacgcgactatctaggtatttgtatctcaccgatagagaacatataaatgtagactctattaaacagttgtgtaaaatatcagatcctaatgcatgttatagatgtggatgtacggctttacatgagtacttttataattatagatcagtcaacggaaaatacaagtatagatacaacggttactatcaatattattcatctagcgattatgaaaattataatgaatattattatgatagaactggtatgaacagtgagagtgataatatatcaatcaaaacagaatatgaattctatgatgaaacacaagatcaaagtacacaactagtaggttacgacattaaactcaaaaccaatgaggatgattttatggctatgatagatcagtgggtgtccatgattatatagatgaatcaattaataaagtagtatatggaagagagtctcacgtaagatggcgggatatatggcaagaacataatgatggcgtatacagtataggaaaggagtgcatagataatatatacgaagacaaccataccgtagacgaattctacaagatagacagcgtatcagatgtagatgacgcggaacacatatctccgataactaaaaaaccatagaatcagttgatgataatacctacatttctaatcttccgtataccatcaaatacaaaatattcgagcaacaataagtattttttatacctttaaaactgataaataaattttttctagtgatattttggcaagatgagaatcctatttctcatcgctttcatgtatgggtgtgttcactcatatgttaacgcggttgaaaccaaatgtccaaatctagacattgtaacatcttctggagaatttcattgttcaggatgtgtggaacatatgcctgagtttagctatatgtattggttggcaaaggatatgaaatcggacgaggataccaagtttatagaacatctgggtgatggcatcaaagaagatgaaaccgttcgtaccacagatagtggaatcgtcactctacgtaaagtccttcatgtaaccgatactaataaatttgataattataggttcacttgtgtcctcactacgatagatggcgtttcaaaaaagaatatttggctgaagtagtgcgtgctactatttttatttatgatataatctaatggaattaatttgaattgatatttatccaatactaaagattatattagaatcaaattaatcttttatacgagaaaaaataacgacatacgtcgtcaacaaattaaactttttatttattagttaactagcttatagaacttgctcattgttatgtttctaaaacgggtacggcatataggacaattatccgacgcaccggtttctcttcgtgttctatgccatatattgatgcatgttatgcaaaatatatgagtacacgaatccaataaaccaaagtatctatcgttttgagtaaacaacttcatagcaaattccacattctttttctttacttactctatacacgtcctcgtatttatttagtattttgatgatatccaactcagaaatggttgttgtattattgggtgtataggtattattagctatgtaccaatttaccaaccctcttaatattgattgataatcacatcggttatccaatcaataaccacattaataactaaattgtagtgtatatatagaccatatatgtttctatttttttgacagttacgtatagtttcagtaagttttgattgttgtattcctgtatctctagataagttagtcatatagtcccttccggcgatacgttttttccaagcccgaaattgattagccaaatgtgtatttatttttgtgatattgatataatatttcggataatgcatactgttagtcttatatcatttggttcatctatgtattgtaatattgttacatgatctatagatgatgtattgattttggcaggatcgaattccatatccgcgactaaacagtgaaaaaaatgtaaatactttttaaattttaaattagtaaaacttttttttattttttatgattccaaaaatactgaatacaaagtcctaaattataaatatggagatcatactaccacaacttattattatgtatacaaggccggtgtaatagatagatatatataattctattacaccggcagacaattaccgaccggtatttgtcgttaccaacataccgtataatatgtaatatacaattccataacccattgacagttgttatacatcaaaattgcaattcttttgattacgatgttataagaatgtagttaattgatgtatgatgttaatgtgtcctctttcctcttataacatcgtaatcaaaaacttttttataatatatacctaataatgtgtcttaatagttctcgtgattcgtcaaacaatcattcttataaaatataataaagcaacgtaaaaacacataaaaataagcgtaactaataagacaatggatatttacgacgataaaggtctacagactattaaactgtttaataatgaatttgattgtataaggaatgacatcagagaattatttaaacatgtaactgattccgatagtatacaacttccgatggaagacaattctgatattatagaaaatatcagaaaaatactatatagacgattaaaaaatgtagaatgtgttgacatcgataacacaataacttttatgaaatacgatccaaatgatgataataagcgtacgtgttctaattgggtacccttaactaataactatatggaatattgtctagtaatatatttggaaacaccgatatgtggaggcaaaataaaattataccaccctacaggaaatataaagtcggataaggatattatgtttgcaaagactctagactaagatagacagcgtatcagatgtagatgacgcggaacacatatctcctataactaatgatgtatctacacaaacatgggaaaagaaatcagagttagatagatacatggaatcgtatcctcgtcatagatatagtaaacattctgtatttaagggattttctgataaagttagaaaaaatgatttagacatgaatgtggtaaaagaattactttctaacggtgcatctctaacaatcaaggatagcagtaataaggatccaattgctgtttattttagaagaacgataatgaatttagaaatgattgatattattaacaaacatacaactattgatgaacgaaagtatatagtacactcctatctaaaaaattatagaaatttcgattatccatttttcaggaagttagttttgactaataaacattgtctcaacaattattataatataagcgacagcaaatatggaacaccgctacatatattggcgtctaataaaaaattaataactcctaattacatgaagttattagtgtataacggaaatgatataaacgcacgaggtgaagatacacaaatgcgaaccaactcagaaatggttgttgtattattgggtgtataggtattattagctatgtaccaatttaccaaccctcttaatattgattgataatcacatcggttatccaattaataactaaattgtagtgtatatatagaccatatatgtttctatttttttgacagttacgtatagtttcagtaagttttgattgttgtattcctgtatctctagataagttagtcatatagtcccttccggcgatacgttttttccaagcccgaaattgattagccaaatgtgtatttatttttgtgatattgatataatatttcggataatgcatactgttagtcttatatcatttggttcatctatgtattgtaatattgttacatgatctatagatgatgtattgattttggcaggatcgaattccatatccgcgactaaacagtgaaaaaaatgtaaatactttttaaattttaaattagtaaaacttttttttattttttatgattccaaaaatactgaatacaaagtcctaaattataaatatggagatcatactaccacaacttattattatgtatacaaggccggtgtaatagatagatatatataattctattacaccggcagacaattaccgaccggtatttgtcgttaccaacataccgtataatatgtaatatacaattccataacccattgacagttgttatacatcaaaattgcaattcttttgattacgatgttataagaatgtagttaattgatgtatgatgttaatgtgtcctctttcctcttataacatcgtaatcaaaaacttttttataatatatacctaataatgtgtcttaatagttctcgtgattcgtcaaacaatcattcttataaaatataataaagcaacgtaaaaacacataaaaataagcgtaactaataagacaatggatatttacgacgataaaggtctacagactattaaactgtttaataatgaatttgattgtataaggaatgacatcagagaattatttaaacatgtaactgattccgatagtatacaacttccgatggaagacaattctgatattatagaaaatatcagaaaaatactatatagacgattaaaaaatgtagaatgtgttgacatcgataacacaataacttttatgaaatacgatccaaatgatgataataagcgtacgtgttctaattgggtacccttaactaataactatatggaatattgtctagtaatatatttggaaacaccgatatgtggaggcaaaataaaattataccaccctacaggaaatataaagtcggataaggatattatgtttgcaaagactctagactttaaatcaacgaaagtgttaactggacgtaaaacaattgccgttctagacatatccgtttcatataatagatcaatgactactattcactacaacgacgacgttgatatagatatacatactgataaaaatggaaaagagttatgttattgttatataacaatagatgatcattacttggttgatgtggaaactataggagttatagtcaatagatctggaaaatgtctgttagtaaataaccatctaggtataggtatcgttaaagataaacgtataagcgatagttttggagatgtatgtatggatacaatatttgacttttctgaagcacgagagttattttcattaactaatgatgataacaggaatatagcatgggacactgataaactagacgatgatacagatatatggactcccgtcacagaagatgattacaaatttctttctagactagtattgtatgcaaaatctcaatcggatactgtatttgactattatgttcttactggtgatacggaaccacccactgtattcattttcaaggtaactagattttactttaatatgccgaaataaaaaatttttgtataatatctagaggtagaggtattgtttagataaatacaaataacatagatacatcgcatacttagcatttttataaatatacataagacatacactttatacatttttgtaaaaatactcataaaaaaatttataaaaattatggcacaaccatatcttgtataggtagtttagttcgtcgagtgaacctataaacagataatagacaacacataataatgcctactaatacaagcataataccgggagatgggatatatgacgttgtagtgtttgggttttctgaacgttgatagtctactaatactacatgctgacatctaatgcctgtataaccatgagagcatctacaatacataccgtcaatatctctagcgtggatacagtcaccgtgtaaacaatatccatctccctctggaccgcataatctgatagctggaatatctgttgtagcgtttgtaatttctggcaatgtcgtttcgatagcgttaccactatcggcgaatgatctgattatcatagcagcgaacaacaacatcagataatttatcaacatttttgatggattctgtgtttatgctgtttctcagtgtgtgtttatgacaagattgggaattttatattattaattcagtaatataaactaataatatattgttaattgtgtaaataatataaaaataacaatacaatattgaatgtgttgctgttaaaaatgtatgtgttaatataatagaataaaataaatgagtatgatcattttagataacgattgattttatcattaccgcttcattcttatattctttgcttacggaacctatatttagaaacatctactaacaattttttatgcttgcattattaatggtatgtaatatgattgattgtgtacgcaataccaatttgttaagtatgaatacggggtacaaacataaattgaaatttaacattatttatttatgatatatatcgttatcgttaggtctataccatggatatctttaaagaactaatcttaaaacaccctgatgaaaatgttttgatttctccagtttccattttatctactttatctattctaaatcatggagcagctggttctacagctgaacaactatcaaaatatatagagaatatgaatgagaatacacccgatgacaataatgatgacatggaggtagatattccgtattgtgcgacactagctaccgcaaataaaatatacggtagcgatagtatcgagttccacgcctccttcctacaaaaaataaaagacgattttcaaactgtaaactttaataatgctaaccaaacaaaggaactaatcaacgaatgggttaagacaatgacaaatggtaaaattaattccttattgactagtccgctatccattaatactcgtatgacagttgttagcgccgtccattttaaagcaatgtggaaatatccattttctaaacatcttacatatacagacaagttttatatttctaagaatatagttaccagcgttgatatgatggtgggtaccgagaataacttgcaatatgtacatattaatgaattattcggaggattctctattatcgatattccatacgagggaaactctagtatggtaattatactaccggacgacatagaaggtatatataacatagaaaaaaatataacagatgaaaaatttaaaaaatggtgtggtatgttatctactaaaagtatagacttgtatatgccaaagtttaaagtggaaatgacagaaccgtataatctggtaccgattttagaaaatttaggacttactaatatattcggatattatgcagattttagcaagatgtgtaatgaaactatcactgtagaaaaatttctacatacgacgtttatagatgttaatgaggagtatacagaagcatcggccgttacaggagtatttacgattaacttttcgatggtatatcgtacgaaggtctacataaaccatccattcatgtacatgattaaagacaccacaggacgtatactttttatagggaaatactgctatccgcaataaatataaacaaatagacttttataaagagtcttcaacgataagtatatcgacatactacttatgctgcgaaagattctgaacgagaacgactatctcaccctcttggatcatatccgcactgctaaatactaaatctccactacactttttatcatcttatgaggaatgattgccttcgtgaaataggaataattagcaccagaatagctatggattattgtggtagagagtgcactattctatgtcgtctactggatgaagatgtgacgtacaaaaaaataaaactagaaattgaaacgtgtcacaacttatcaaaacatatagatagacgaggaaacaatgcgctacattgttacgtctccaataaatgcgatacagacattaagattgttctctcgcggagtcgagagactttgtagaaacaacgaaggattaactccgctaggagtatacagtaagcatagatacgtaaaatctcagattgtgcatctactgatatccagctattcaaattcctctaacgaactcaagtcgaatataaatgatttcgatctgtattcggataatatcgacttacgtctgctaaaatacctaattgtggataaacggatacgtccgtccaagaatacgaattatgcaatcaatggtctcggattggtggatatatacgtaacgacgcctaatccgagaccagaagtattgctatggcttcttaaatcagaatgttacagcaccggttacgtatttcgtacctgtatgtacgacagtgatatgtgtaagaactctcttcattactatatatcgtctcatagagaatctcaatctctatccaaggatgtaattaaatgtttgatcgataacaatgtttccatccatggcagagacgaaggaggatctttacccatccaatactactggtctttctcaaccatagatatagagattgttaaattattattaataaaggatgtggacacgtgtagagtatacgacgtcagccctatattagaggcgtattatctaaacaagcgatttagagtaaccccatataatgtagacatggaaatcgttaatcttcttattgagagacgtcatactcttgtcgacgtaatgcgtagtattacttcgtacgattccagagaatataaccactacatcatcgataacattctaaagagatttagacaacaggatgtacaagccatgttgataaactacttacattacggcgatatggtcgttcgatgcatgttagataacggacaacaactatcctctgcacgactactttgttaataataatctcgtcgatgtaaacgtcgtaaggtttatcgtggaaaatatggacacgcggctgtaaatcacgtatcgaacaatggccgtctatgtatgtacggtctgatattatcgagatttaataattgcgggtatcactgttatgaaaccatactgatagatgtatttgatatactaagcaagtacatggatgatatagatatgatcgataactctactatattacgcggtcgatgtcaataatatacaatttgcaaagcggttattggaatatggagcgagtgtcacgctcgataatcaatacggccatccagaaaagcagttaccaaagagaaaacaaaacgaagctagttgatttattactgagttaccatcccactctagagactatgattgacgcatttaatagagatatacgctatctatatcctgaaccattattcgcctgtatcagatacgccttaatcctagatgatgattttccttctaaagtaaagtatgatatcgccggtcgtcataaggaactaaagcgctatagagtagacattaatagaatgaagaatgtctacatatcaggcgtctccatgtttgatatattatttaaacgaagcaaacgccacaaattgagatacgcaaagaatccgacatcaaatggtacaaaaaagaactaacgtccatcattacagaaactgtaaagaacaatgagaggatcgactccatagtggacaacattaatacagacgataacttgatttcgaaattacccatggagatactttattactccattaaataatttatcatggagcgataatgtcctgtttcatttgtttccatgacatattacaaaatcgattccgtccaagatgataaaaacatttaccggcatcataaacacggagtttattttatatgtctcgcataaacattactaaaaaaatatattgtcgataacttgatttcgaaattacccatggagatactttattactccattaaataatttatcatggagcgataatgtcctgtttcatttgtttccatgacatattacaaaatcgattccgtccaagatgataaaaacatttaccggcatcataaacacggagtttattttatatgtctcgcataaacattactaaaaaaatatattgttctgtttttctttcacatctttaattatgaaaaagtaaatcattatgagatggacgagattgtacgcatcgttcgcgacagtatgtggtacatacctaacgtatttatggacgacggtaagaatgaaggtcacgtttctgtcaacaatgtctgtcatatgtattttacgttctttgatgtggatacatcgtctcatctgtttaagctagttattaaacactgcgatctgaataaacgaggtaactctccattacattgctatacgatgaatacacgatttaatccatctgtattaaagatattgttacaccacggcatgcgtaactttgatagcaaggatgaccactatcaatcgataacaagatctttgatatactaacggacaccattgatgactttagtaaatcatccgatctattgctgtgttatcttagatataaattcaatgggagcttaaactattacgttctgtacaaaggatccgaccctaattgcgccgacgaggatgaactcacttctcttcattactactgtaaacacatatccacgttctacgaaagcaattattacaagttaagtcacactaagatgcgagccgagaagcgattcatctacgcgataatagattatggagcaaacattaacgcggttacacacttaccttcaacagtataccaaacatagtcctcgtgtggtgtatgctcttttatctcgaggagccgatacgaggatacgtaataatcttgattgtacacccatcatggaacgattgtgcaacaggtcatattctcataatgttactcaattggcacgaacaaaaggaagaaggacaacatctactttatctattcataaaacataatcaaggatacactctcaatatactacggtatctattagataggttcgacattcagaaagacgaatactataataccgcctttcaaaattgtaacaacaatgttgcctcatacatcggatacgacatcaaccttccgactaaagacggtattcgacttggtgtttgaaaacagaaacatcatatacaaggcggatgttgtgaatgacatcatccaccacagactgaaagtatctctacctatgattaaatcgttgttctacaagatgtctctccctacgacgattactacgtaaaaaagatactagcctactgcctattaagggacgagtcattcgcggaactacatagtaaattctgtttaaacgaggactataaaagtgtatttatgaaaaatatatcattcgataagatagattccatcatcgtgacataagtcgcctcaaagagattcgaatctccgacaccgacctgtatacggtatcacagctatcttaaagccatacattcagacagtcacatttcatttcccatgtacgacgatctcatagaacagtgccatctatcgatggagcgtaaaagtaaactcgtcgacaaagcactcaataaattagagtctaccatcggtcaatctagactatcgtatttgcctccggaaattatgcgcaatatcatctaaacagtatgttgtacggaaagaaccattacaaatattatccatgatagaaagaaaatatctatatgattggagaagtaggaaacaggaacaagacaacgattactacattattaaatcatgaagtccgtattatactcgtatatattgtttctctcatgtataataataaacggaagagatatagcaccgcatgcaccatccgatggaaagtgtaaagacaacgaatacaaacgccataatttgtgtccgggaacatacgcttccagattatgcgatagcaagactaacacacgatgtacgccgtgtggttcgggtaccttcacatctcgcaataatcatttacccgcttgtctaagttgtaacggaagacgcgatcgtgtaacacgactcacaatagaatctgtgaatgctctcccggatattattgtcttctcaaaggatcatccggatgcaaggcatgtgtttcccaaacaaaatgtggaataggatacggagtatccggagacgtcatctgttctccgtgtggtctcggaacatattctcacaccgtctcttccgcagataaatgcgaacccgtacccagaaatacgtttaactatatcgatgtggaaattaacctgtatccagttaacgacacgtcgtgtactcggacgaccactaccggtctcagcgaatccatctcaacgtcggaactaactattactatgaatcataaagactgtaatcccgtatttcgtgatggatacttctccgttcttaataaggtagcgacttcaggtttctttacaggagaaaggtgtgcactctgaatttcgagattaaatgcaataacaaagattcttcctccaaacagttaacgaaagcaaagaatgatactatcatgccgcattcggagacagtaactctagtgggcgacatctatatactatatagtaataccaatactcaagactacgaaactgatacaatctcttatcatgtgggtaatgttctcgatgtcgatagccatatgcccggtagttgcgatatacataaactgatcactaattccaaacccacccactttttatagtaagtttttcacccataaataataaatacaataattaatttctcgtaaaagtagaaaatatattctaatttattgcacggtaaggaagtagaatcataaagaacagtactcaatcaatagcaattatgaaacaatatatcgtcctggcatgcatgtgcctggcggcagctgctatgcctgccagtcttcagcaatcatcctcatcctcctcctcgtgtacggaagaagaaaacaaacatcatatgggaatcgatgttattatcaaagtcacaaagcaagaccaaacaccgaccaatgataagatttgccaatccgtaacggaaattacagagtccgagtcagatccagatcccgaggtggaatcagaagatgattccacatcagtcgaggatgtagatcctcctaccacttattactccatcatcggtggaggtctgagaatgaactttggattcaccaaatgtcctcagattaaatccatctcagaatccgctgatggaaacacagtgaatgctagattgtccagcgtgtccccaggacaaggtaaggactctcccgcgatcactcatgaagaagctcttgctatgatcaaagactgtgaagtgtctatcgacatcagatgtagcgaagaagagaaagacagcgacatcaagacccatccagtactcgggtctaacatctctcataagaaagtgagttacgaagatatcatcggttcaacgatcgtcgatacaaaatgcgtcaagaatctagagtttagcgttcgtatcggagacatgtgcaaggaatcatctgaacttgaggtcaaggatggattcaagtatgtcgacggatcggcatctgaaggtgcaaccgatgatacttcactcatcgattcaacaaaactcaaagcgtgtgtctgaatcgataactctattcatctgaaattggatgagtagggttaatcgaacgattcaggcacaccacgaattaaaaaagtgtaccggacactatattccggtttgcaaaacaaaaatgttcttaactacattcacaaaaagttacctctcgcgacttcttctttttctgtctcaatagtgtgatacgattatgacactattcctattcctattcctatttcctttcagagtatcacaaaaatattaaacctctttctgatggtctcataaaaaaagttttacaaaaatatttttattctctttctctctttgatggtctcataaaaaaagttttacaaaaatatttttattctctttctctctttgatggtctcataaaaaaagttttacaaaaatatttttattctctttctctctttgatggtctcataaaaaaagttttacaaaaatatttttattctctttctctctttgatggtctcataaaaaaagttttacaaaaatatttttattctctttctctctttgatggtctcataaaaaaagttttacaaaaatatttttattctctttctctctttgatggtctcataaaaaaagttttacaaaaatatttttattctctttctctctttgatggtctcataaaaaaagttttacaaaaatatttttattctctttctctctttgatggtctcataaaaaaagttttacaaaaatatttttattctctttctctctttgatggtctcataaaaaaagttttacaaaaatatttttattctctttctctctttgatggtctcataaaaaaagttttacaaaaatatttttattctctttctctctttgatggtctcataaaaaaagttttacaaaaatatttttattctctttctctctttgatggtctcataaaaaaagttttacaaaaatatttttattctctttctctctttgatggtctcataaaaaaagttttacaaaaatatttttatt

SEQ ID NO: 3 - DNA, 183369 bp, Artificial Sequence
  LIVP 1.1.1
tttttttatgagaccatcaaagagagaaagagaataaaaatatttttgtaaaactttttttatgagaccatcaaagagagaaagagaataaaaatatttttgtaaaactttttttatgagaccatcaaagagagaaagagaataaaaatatttttgtaaaactttttttatgagaccatcaaagagagaaagagaataaaaatatttttgtaaaactttttttatgagaccatcaaagagagaaagagaataaaaatatttttgtaaaactttttttatgagaccatcaaagagagaaagagaataaaaatatttttgtaaaactttttttatgagaccatcaaagagagaaagagaataaaaatatttttgtaaaactttttttatgagaccatcaaagagagaaagagaataaaaatatttttgtaaaactttttttatgagaccatcaaagagagaaagagaataaaaatatttttgtaaaactttttttatgagaccatcaaagagagaaagagaataaaaatatttttgtaaaactttttttatgagaccatcagaaagaggtttaatatttttgtgatactctgaaaggaaataggaataggaataggaatagtgtcataatcgtatcacactattgagacagaaaaagaagaagtcgcgagaggtaactttttgtgaatgtagttaagaacatttttgttttgcaaaccggaatatagtgtccggtacacttttttaattcgtggtgtgcctgaatcgttcgattaaccctactcatccaatttcagatgaatagagttatcgattcagacacacgctttgagttttgttgaatcgatgagtgaagtatcatcggttgcaccttcagatgccgatccgtcgacatacttgaatccatccttgacctcaagttcagatgattccttgcacatgtctccgatacgaacgctaaactctagattcttgacacattttgtatcgacgatcgttgaaccgatgatatcttcgtaactcactttcttatgagagatgttagacccgagtactggatgtcgctgtctttctcttcttcgctacatctgatgtcgatagacacctcacagtctttgatcatagcaagagcttcttcatgagtccttaccttgtcctggggacacgctggacaatctagcattcactgtgtttccatcagcggattctgagatggatttaatctgaggacatttggtgaatccaaagttcattctcagacctccaccgatgatggagtaataagtggtaggaggatctacatcctcgactgatgtggaatcatcttctgattccacctcgggatctggatctgactcggactctgtaatttccgttacggattggcaaatcttatcattggtcggtgtttggtcttgctttgtgactttgataataacatcgattcccatatgatgtttgttttcttcttccgtacacgaggaggaggatgaggatgattgctgaagactggcaggcatagcagctgccgccaggcacatgcatgccaggacgatatattgtttcataattgctattgattgagtactgttctttatgattctacttccttaccgtgcaataaattagaatatattttctacttttacgagaaattaattattgtatttattatttatgggtgaaaaacttactataaaaagtgggtgggtttggaattagtgatcagtttatgtatatcgcaactaccgggcatatggctatcgacatcgagaacattacccacatgataagagattgtatcagtttcgtagtcttgagtattggtattactatatagtatatagatgtcgcccactagagttactgtctccgaatgcggcatgatagtatcattctttgctttcgttaactgtttggaggaagaatctttgttattgcatttaatctcgaaattcagagtgcacacctttctcctgtaaagaaacctgaagtcgctaccttattaagaacggagaagtatccatcacgaaagacgggattacagtctttatgattcatagtaatagttagttccgacgttgagatggattcgctgagaccggtagtggtcgtccgagtacacgacgtgtcgttgacgggatacaggttaatttccacatcgatatagttaaaggtatttctgggtacgggttcgcatttatctgcggaagagacggtgtgagaatatgttccgagaccacacggagaacagatgacgtctccggatactccgtatcctattccacattttgtttgggaaacacatgccttgcatccggatgatcctttgagaagacaataatatccgggagagcattcacagattctattgtgagtcgtgttacacgatcgcgtcttccgttacaacttagacaagcgggtaaatgattattgcgagatgtgaaggtacccgaaccacacggcgtacattgtgtgttagtcttgctatcgcataatctggaagcgtatgttcccggacacaaattatggcgtttgtattcgttgtctttacactttccatcggatggtgcatgcggtgctatatctcttccgtttattattatacatgagagaaacaatatatacgagtataatacggacttcatgatttaataatgtagtaatcgtcgtcttgttcctgtttcctacttctccaatcatatagatattttctttctatcatggataatatttgtaatggttctttccgtacaacatactgtttagatgatattgcgcataatttccggaggcaaatacgatagtctagattgaccgatggtagactctaatttattgagtgctttgtcgacgagtttacttttacgctccatcgatagatggcactgttctatgagatcgtcgtacatgggaaatgaaatgtgtctgtctgaatgtatggctttaagatagctgtgataccgtatacaggtcggtgtcggagattcgaatctctttaaggcgacttatgtcacgatgatggaatctatcttatcgaatgatatatttttcataaatacacttttatagtcctcgtttaaacagaatttactatgtagttccgcgaatgactcgtcccttaataggcagtaggctagtatcttttttacgtagtaatcgtcgtagggagagacatcttgtagaacaacgatttaatcataggtagagatactttcagtctgtggtggatgatgtcattcacaacatccgccttgtatatgatgtttctgttttcaaacaccaagtcgaataccgtctttagtcggaaggttgatgtcgtatccgatgtatgaggcaacattgttgttacaattttgaaaggcggtattatagtattcgtctttctgaatgtcgaacctatctaatagataccgtagtatattgagagtgtatccttgattatgttttatgaatagataaagtagatgttgtccttcttccttttgttcgtgccaattgagtaacattatgagaatatgacctgttgcacaatcgttccatgatgggtgtacaatcaagattattacgtatcctcgtatcggctcctcgagataaaagagcatacaccacacgaggactatgtttggtatactgttgaaggtaagtgtgtaaccgcgttaatgtttgctccataatctattatcgcgtagatgaatcgcttctcggctcgcatcttagtgtgacttaacttgtaataattgctttcgtagaacgtggatatgtgtttacagtagtaatgaagagaagtgagttcatcctcgtcggcgcaattagggtcggatcctttgtacagaacgtaatagtttaagctcccattgaatttatatctaagataacacagcaatagatcggatgatttactaaagtcatcaatggtgtccgttagtatatcaaagatcttgttatcgattgatagtggtcatccttgctatcaaagttacgcatgccgtggtgtaacaatatctttaatacagatggattaaatcgtgtattcatcgtatagcaatgtaatggagagttacctcgtttattcagatcgcagtgtttaataactagcttaaacagatgagacgatgtatccacatcaaagaacgtaaaatacatatgacagacattgttgacagaaacgtgaccttcattcttaccgtcgtccataaatacgttaggtatgtaccacatactgtcgcgaacgatgcgtacaatctcgtccatctcataatgatttactttttcataattaaagatgtgaaagaaaaccgaacaatatatttttttagtaatgtttatgcgagacatataaaataaactccgtgtttatgatgccggtaaatgtttttatcatcttggacggaatcgattttgtaatatgtcatggaaacaaatgaaacaggacattatcgctccatgataaattatttaatggagtaataaagtatctccatgggtaatttcgaaatcaagttatcgtctgtattaatgttgtccactatggagtcgatcctctcattgttctttacagtttctgtaatgatggacgttagttcttttttgtaccatttgatgtcggattctttgcgtatctcaatttgtggcgtttgcttcgtttaaataatatatcaaacatggagacgcctgatatgtagacattcttcattctattaatgtctactctatagcgctttagttccttatgacgaccggcgatatcatactttactttagaaggaaaatcatcatctaggattaaggcgtatctgatacaggcgaataatggttcaggatatagatagcgtatatctctattaaatgcgtcaatcatagtctctagagtgggatggtaactcagtaataaatcaactagcttcgttttgttttctctttggtaactgcttttctggatggccgtattgattatcgagcgtgacactcgctccatattccaataaccgctttgcaaattgtatattattgacatcgaccgcgtaatatagtagagttatcgatcatatctatatcatccatgtacttgcttagtatatcaaatacatctatcagtatggtttcataacagtgatacccgcaattattaaatctcgataatatcagaccgtacatacatagacggccattgttcgatacgtgatttacagccgcgtgtccatattttccacgataaaccttacgacgtttacatcgacgagattattattaacaaagtagtcgtgcagaggatagttgttgtccgttatctaacatgcatcgaacgaccatatcgccgtaatgtaagtagtttatcaacatggcttgtacatcctgttgtctaaatctctttagaatgttatcgatgatgtagtggttatattctctggaatcgtacgaagtaatactacgcattacgtcgacaagagtatgacgtctctcaataagaagattaacgatttccatgtctacattatatggggttactctaaatcgcttgtttagataatatagggctgacgtcgtatactctacacgtgtccacatcctttattaataataatttaacaatctctatatctatggttgagaaagaccagtagtattggatgggtaaagatcctccttcgtctctgccatggatggaaacattgttatcgatcaaacatttaattacatccttggatagagattgagattctctatgagacgatatatagtaatgaagagagttcttacacatatcactgtcgtacatacaggtacgaaatacgtaaccggtgctgtaacattctgatttaagaagccatagcaatacttctggtctcggattaggcgtcgttacgtatatatccaccaatccgagaccattgattgcataattcgtattcttggacggacgtatccgtttatccacaattaggtattttagcagacgtaagtcgatattatccgaatacagatcgaaatcatttatattcgacttgagttcgttagaggaatttgaatagctggatatcagtagatgcacaatctgagattttacgtatctatgcttactgtatactcctagcggagttaatccttcgttgtttctacaaagtctctcgactccgcgagagaacaatcttaatgtctgtatcgcatttattggagacgtaacaatgtagcgcattgtttcctcgtctatctatatgttttgataagttgtgacacgtttcaatttctagttttatttttttgtacgtcacatcttcatccagtagacgacatagaatagtgcactctctaccacaataatccatagctattctggtgctaattattcctatttcacgaaggcaatcattcctcataagatgataaaaagtgtagtggagatttagtatttagcagtgcggatatgatccaagagggtgagatagtcgttctcgttcagaatctttcgcagcataagtagtatgtcgatatacttatcgttgaagactctttataaaagtctatttgtttatatttattgcggatagcagtatttccctataaaaagtatacgtcctgtggtgtctttaatcatgtacatgaatggatggtttatgtagaccttcgtacgatataccatcgaaaagttaatcgtaaatactcctgtaacggccgatgcttctgtatactcctcattaacatctataaacgtcgtatgtagaaatttttctacagtgatagtttcattacacatcttgctaaaatctgcataatatccgaatatattagtaagtcctaaattttctaaaatcggtaccagattatacggttctgtcatttccactttaaactttggcatatacaagtctatacttttagtagataacataccacaccattttttaaatttttcatctgttatatttttttctatgttatatataccttctatgtcgtccggtagtataattaccatactagagtttccctcgtatggaatatcgataatagagaatcctccgaataattcattaatatgtacatattgcaagttattctcggtacccaccatcatatcaacgctggtaactatattcttagaaatataaaacttgtctgtatatgtaagatgtttagaaaatggatatttccacattgctttaaaatggacggcgctaacaactgtcatacgagtattaatggatagcggactagtcaataaggaattaattttaccatttgtcattgtcttaacccattcgttgattagttcctttgtttggttagcattattaaagtttacagtttgaaaatcgtcttttattttttgtaggaaggaggcgtggaactcgatactatcgctaccgtatattttatttgcggtagctagtgtcgcacaatacggaatatctacctccatgtcatcattattgtcatcgggtgtattctcattcatattctctatatattttgatagttgttcagctgtagaaccagctgctccatgatttagaatagataaagtagataaaatagaaactggagaaatcaaaacattttcatccgtgtgttttaagattagttctttaaagatatccatggtatagaccaaacaataacgataacgatatatatcataaataaataatgttaaatttcagtttatgtttgtaccccgtattcatacttaacaaattggtattgcgtacacaatcaatcatattacataccattaataatgcaagcataaaaaattgttagtagatgtttctaaatataggttccgtaagcaaagaatataagaatgaagcggtaatgataaaatcaatcgttatctaaaatgatcatactcatttattttattctattatattaacacatacatttttaacagcaacacattcaatattgtattgttatttttatattatttacacaattaacaatatattattagtttatattactgaattaataatataaaattcccaatcttgtcataaacacacactgagaaacagcataaacacagaatccatcaaaaatgttgataaattatctgatgttgttgttcgctgctatgataatcagatcattcgccgatagtggtaacgctatcgaaacgacattgccagaaattacaaacgctacaacagatattccagctatcagattatgcggtccagagggagatggatattgtttacacggtgactgtatccacgctagagatattgacggtatgtattgtagatgctctcatggttatacaggcattagatgtcagcatgtagtattagtagactatcaacgttcagaaaacccaaacactacaacgtcatatatcccatctcccggtattatgcttgtattagtaggcattattatgtgttgtctattatctgtttataggttcactcgacgaactaaactacctatacaagatatggttgtgccataatttttataaatttttttatgagtatttttacaaaaatgtataaagtgtatgtcttatgtatatttataaaaatgctaagtatgcgatgtatctatgttatttgtatttatctaaacaatacctctacctctagatattatacaaaaattttttatttcggcatattaaagtaaaatctagttaccttgaaaatgaatacagtgggtggttccgtatcaccagtaagaacataatagtcaaatacagtatccgattgagattttgcatacaatactagtctagaaagaaatttgtaatcatcttctgtgacgggagtccatatatctgtatcatcgtctagtttatcagtgtcccatgctatattcctgttatcatcattagttaatgaaaataactctcgtgcttcagaaaagtcaaatattgtatccatacatacatctccaaaactatcgcttatacgtttatctttaacgatacctatacctagatggttatttactaacagacattttccagatctattgactataactcctatagtttccacatcaaccaagtaatgatcatctattgttatataacaataacataactcttttccatttttatcagtatgtatatctatatcaacgtcgtcgttgtagtgaatagtagtcattgatctattatatgaaacggatatgtctagaacggcaattgttttacgtccagttaacactttcgttgatttaaagtctagagtctttgcaaacataatatccttatccgactttatatttcctgtagggtggtataattttattttgcctccacatatcggtgtttccaaatatattactagacaatattccatatagttattagttaagggtacccaattagaacacgtacgcttattatcatcatttggatcgtatttcataaaagttattgtgttatcgatgtcaacacattctacattttttaatcgtctatatagtatttttctgatattttctataatatcagaattgtcttccatcggaagttgtatactatcggaatcagttacatgtttaaataattctctgatgtcattccttatacaatcaaattcattattaaacagtttaatagtctgtagacctttatcgtcgtaaatatccattgtcttattagttacgcttatttttatgtgtttttacgttgctttattatattttataagaatgattgtttgacgaatcacgagaactattaagacacattattaggtatatattataaaaaagtttttgattacgatgttataagaggaaagaggacacattaacatcatacatcaattaactacattcttataacatcgtaatcaaaagaattgcaattttgatgtataacaactgtcaatgggttatggaattgtatattacatattatacggtatgttggtaacgacaaataccggtcggtaattgtctgccggtgtaatagaattatatatatctatctattacaccggccttgtatacataataataagttgtggtagtatgatctccatatttataatttaggactttgtattcagtatttttggaatcataaaaaataaaaaaaagttttactaatttaaaatttaaaaagtatttacatttttttcactgtttagtcgcggatatggaattcgatcctgccaaaatcaatacatcatctatagatcatgtaacaatattacaatacatagatgaaccaaatgatataagactaacagtatgcattatccgaaatattatatcaatatcacaaaaataaatacacatttggctaatcaatttcgggcttggaaaaaacgtatcgccggaagggactatatgactaacttatctagagatacaggaatacaacaatcaaaacttactgaaactatacgtaactgtcaaaaaaatagaaacatatatggtctatatatacactacaatttagttattaattggataaccgatgtgattatcaatcaatattaagagggttggtaaattggtacatagctaataatacctatactccaaatacacccaataatacaacaaccatttctgagttggatatcatcaaaatactggataaatacgaggacgtgtatagagtaagtaaagaaaaagaatgtggaatttgctatgaagttgtttactcaaaacgatagatactttggtttattggattcgtgtactcatatattttgcataacatgcatcaatatatggcatagaacacgaagagaaaccggtgcgtcggataattgtcctatatgccgtacccgttttagaaacataacaatgagcaagttctataagctagttaactaataaataaaaagtttaatttgttgacgacgtatgtcgttattttttctcgtataaaagattaatttgattctaatataatctttagtattggataaatatcaattcaaattaattccattagattatatcataaataaaaatagtagcacgcactacttcagccaaatattcttttttgaaacgccatctatcgtagtgaggacacaagtgaacctataattatcaaatttattagtatcggttacatgaaggactttacgtagagtgacgattccactatctgtggtacgaacggtttcatcttctttgatgccatcacccagatgttctataaacttggtatcctcgtccgatctcatatcctttgccaaccaatacatgtagctaaaattaggcataaatttcacacatcctgaacaatgaaattctccagaagatgttacaatgtctagatttggacatttggtttcaaccgcgttaacatatgagtgaacacacccatacatgaaagcgatgagaaataggattctcatcttgccaaaatatcactagaaaaaatttatttatcagttttaaaggtataaaaaatacttattgttgctcgaatattttgtatttgatggtatacggaagattagaaatgtaggtattatcatcaactgattctatggttttatgtattctatcatgtttcactattgcgttggaaataatatcatatgcttccacatatattttattttgttttaactcataatactcacgtaattctggattattggcatatctatgaataattttagctccatgatcagtaaatattaatgagaacatagtattaccacctaccattatttttttcatctcattcaattcttaattgcaaagatctatataatcattatagcgttgacttatggactctggaatcttagacgatgtacagtcatctataatcatggcatatttaatacattgttttatagcatagtcgttatctacgatgttagatatttctctcaatgaatcaatcacacaatctaatgtaggtttatgacataatagcattttcagcagttcaatgtttttagattcgttgatggcaatggctatacatgtatatccgttatttgatctaatgttgacatctgaaccggattctagcagtaaagatactagagattgtttattatatctaacagccttgtgaagaagtgtttctcctcgtttgtcaatcatgttaatgtctttaagataaggtaggcaaatgtttatagtactaagaattgggcaagcataagacatgtcacaaagacccttttttgtatgtataagtgtaaaaattataacatccatagttggatttacataggtgtccaatcgggatctctccatcatcgagataattgatggcatctcccttccttttttagtagatatttcatcgtgtaagaatcaatattaatatttctaaagtatccgtgtatagcctctttatttaccacagctccatattccactagagggatatcgccgaatgtcatatactcaattagtatatgttggaggacatccgagttcattgttttcaatatcaaagagatggtttccttatcatttctccatagtggtacaatactacacattattccgtgcggctttccattttccaaaaacaatttgaccaaatctaaatctacatctttattgtatctataatcactatttagataatcagccataattcctcgagtgcaacatgttagatcgtctatatatgaataagcagtgttatctattcctttcattaacaatttaacgatgtctatatctatatgagatgacttaatataatattgaagagctgtacaatagtttttatctataaaagacggcttgattccgtgattaattagacatttaacaacttccggacgcacatatgctctcgtatccgactttgaatacagatgagagatgatatacagatgcaatacggtaccgcaatttcgtagttgataatcatcatacgcgtatcagtactcgtcctcataaagaacactgcagccattttctatgaacaaatcaataattttagaaacaggatcattgtcattacataattttctataactgaacgatggttttcacatttaacactcaagtcaaatccatgttctaccaacacctttatcaagtcaacgtctacatttttggatttcatatagctgaatatattaaagttatttatgttgctaaatccagtggcttctagtagagccatcgctatatccttattaactttaacatgtctactatttgtgtattcttctaatggggtaagctgtctccaatttttgcgtaatggattagtgccactgtctagtagtagtttgacgacctcgacattattacaatgctcattaaaaaggtatgcgtgtaaagcattattcttgaattggttcctggtatcattaggatctctgtctttcaacatctgtttaagttcatcaagagccacctcctcattttccaaatagtcaaacattttgactgaatgagctactgtgaactctatacacccacacaactaatgtcattaaatatcatgtcaaaaacttgtacaattattaataaaaataatttagtgtttaaattttaccagttccagattttacacctccgttaatacctccattaaccccactggacgatcctcctccccacattccaccgccaccagatgtataagttttagatcctttattactaccatcatgtccatggataaagacactccacatgccgccactaccccctttagaagacatattaataagacttaaggacaagtttaacaataaaattaatcacgagtaccctactaccaacctacactattatatgattatagtttctatttttacagtaccttgactaaagtttctagtcacaagagcaatactaccaacctacactattatatgattatagtttctatttttataggaacgcgtacgagaaaatcaaatgtctaatttctaacggtagtgttgataaacgattgttatccgcggatacctcctctatcatgtcgtctattttcttactttgttctattaacttattagcattatatattatttgattataaaacttatattgcttattagcccaatctgtaaatatcggattattaacatatcgtttctttgtaggtttatttaacatgtacatcactgtaagcatgtccttaccatttattttaatttgacgcatatccgcaatttctttttcgcagtcggttataaattctatatatgatggatacatgctacatgtgtacttataatcgactaatatgaagtacttgatacatattttcagtaacgatttattattaccacctatgaataagtacctgtgatcgtctaggtaatcaactgttttcttaatacattcgatggttggtaatttactcagaataatttccaatatcttaatatataattctgctatttctgggatatatttatctgccagtataacacaaatagtaatacatgtaaacccatattttgttattatattaatgtctgcgccattatctattaaccattctactaggctgacactatgcgactcaatacaatgataaagtatactacatccatgtttatctattttgtttatatcatcaatatacggcttacaaagttttagtatcgataacacatccaactcacgcatagagaaggtagggaataatggcataatatttattaggttatcatcattgtcattatctacaactaagtttccattttttaaaatatactcgacaactttaggatctctattgccaaatttttgaaaatatttatttatatgcttaaatctatataatgtagctccttcatcaatcatacatttaataacattgatgtatactgtatgataagatacatattctaacaatagatcttgtatagaatctgtatatcttttaagaattgtggatattaggatattattacataaactattacacaattctaaaatataaaacgtatcacggtcgaataatagttgatcaactatataattatcgattttgtgatttttcttcctaaactgtttacgtaaatagttagatagaatattcattagttcatgaccactatagttactatcgaataacgcgtcaaatatttcccgtttaatatcgcatttgtcaagataataatagagtgtggtatgttcacgataagtataataacgcatctctttttcgtgtgaaattaaatagtttattacgtccaaagatgtagcataaccatcttgtgacctagtaataatataataatagagaactgttttacccattctatcatcataatcagtggtgtagtcgtaatcgtaatcgtctaattcatcatcccaattataatattcaccagcacgtctaatctgttctattttgatcttgtatccatactgtatgttgctacatgtaggtattcctttatccaataatagtttaaacacatctacattgggatttgatgttgtagcgtatttttctacaatattaataccatttttgatactatttatttctatacctttcgaaattagtaatttcaataagtctatattgatgttatcagaacatagatattcgaatatatcaaaatcattgatatttttatagtcgactgacgacaataacaaaatcacaacatcgtttttgatattattatttttcttggtaacgtatgcctttaatggagtttcaccatcatactcatataatggatttgcaccactttctatcaatgattgtgcactgctggcatcgatgttaaatgttttacaactatcatagagtatcttatcgttaaccatgattggttgttgatgctatcgcattttttggtttctttcatttcagttatgtatggatttagcacgtttgggaagcatgagctcatatgatttcagtactgtagtgtcagtactattagtttcaataagatcaatctctagatctatagaatcaaaacacgataggtcagaagataatgaatatctgtacgcttcttgttgtactgtaacttctggttttgttagatggttgcatcgtgctttaacgtcaatggtacaaattttatcctcgctttgtgtatcatattcgtccctactataaaattctatattcagattatcatgcgatgtgtatacgctaacggtatcaataaacggagcacaccatttagtcataaccgtaatccaaaaatttttaaagtatatcttaacgaaagaagttgtatcattgtctacggtgtatggtactagatcctcataagtgtatatatctagagtaatgtttaatttattaaatggttgataatatggatcgtcgtggcaatttcctaagatggaaatgagatatagacacgcaataaatctaatcgaagacatggttactccttaaaaaaatacgaataatcaccttggctatttagtaagtgtcatttaacactatactcatattaatccatggactcataatctctatacgggattaacggatgttctatatacggggatgagtagttctcttctttaactttatactttttactaatcatatttagactgatgtatgggtaatagtgtttgaagagctcgttctcatcatcagaataaatcaatatctctgtttttttgttatacagatgtattacagcctcatatattacgtaatagaacgtgtcatctaccttattaactttcaccgcatagttgtttgcaaatacggttaatcctttgacctcgttgatttccgaccaatctgggcgtataatgaatctaaactttaatttcttgtaatcattcgaaataatttttagtttgcatccgtagttatcccctttatgtaactgtaaatttctcaacgcgatatctccattaataatgatgtcgaattcgtgctgtatacccatactgaatggatgaacgaataccgacggcgttaatagtaatttactttttcatctttacatattgggtactagttttactatcataagtttataaattccacaagctactatggaataagccaaccatcttagtataccacacatgtcttaaagtttattaattaattacatgttgttttatatatatcgctacgaatttaaacagagaaatcagtttaggaaaaaaaaaattatctatctacatcatcacgtctctgtattctacgatagagtgctactttaagatgagacatatccgtgtcatcaaaaatatactccattaaaatgattattccggcagcgaacttgatattggatatatcacaacctttgttaatatctacgacaatagacagcagtcccatggttccataaacagtgagtttatctttctttgaagagatattttgtagagatcttataaaactgtcgaatgacatcgcatttatatctttagctaaatcgtatatgttaccatcgtaatatctaaccgcgtctatcttaaacgtttccatcgctttaaagacgtttccgatagatggtctcatttcatcagtcatactgagccaacaaatataatcgtgtataacatctttgatagaatcagactctaaagaaaacgaatcggctttattatacgcattcatgataaacttaatgaaaaatgtttttcgttgtttaagttggatgaatagtatgtcttaataattgttattatttcattaattaatatttagtaacgagtacactctataaaaacgagaatgacataactaatcataactagttatcaaagtgtctaggacgcgtaattttcatatggtatagatcctgtaagcattgtctgtattctggagctattttctctatcgcattagtgagttcagaatatgttataaatttaaatcgaataacgaacataactttagtaaagtcgtctatattaactcttttattttctagccatcgtaataccatgtttaagatagtatattctctagttactacgatctcatcgttgtctagaatatcacatactgaatctacatccaattttagaaattggtctgtgttacatatctcttctatattattgttgatgtattgtcgtagaaaactattacgtagaccattttctttataaaacgaatatatagtactccaattatctttaccgatatatttgcacacataatccattctctcaatcactacatctttaagattttcgttgttaagatatttggctaaactatataattctattagatcatcaacagaatcagtatatatttttctagatccaaagacgaactctttggcgtcctctataatattcccagaaaagatattttcgtgttttagtttatcgagatctgatctgttcatatacgccatgattgtacggtacgttatgataaccgcataaaataaaaatccattttcatttttaaccaatactattcataattgagattgatgtaatactttgttactttgaacgtaaagacagtacacggatccgtatctccaacaagcacgtagtaatcaaatttggtgttgttaaacttcgcaatattcatcaatttagatagaaacttatactcatcatctgttttaggaatccatgtattattaccactttccaacttatcattatcccaggctatgtttcgtccatcatcgttgcgcagagtgaataattcttttgtattcggtagttcaaatatatgatccatgcatagatcggcaaagctattgtagatgtgatttttcctaaatctaatataaaactcgtttactagcaaacactttcctgatttatcgaccaagacacatatggtttctaaatctatcaagtggtggggatccatagttatgacgcagtaacatatattattacattcttgactgtcgctaatatctaaatatttattgttatcgtattggattctgcatatagatggcttgtatgtcaaagatatagaacacataaccaatttatagtcgcgctttacattctcgaatctaaagttaagagatttagaaaacattatatcctcggatgatgttatcactgtttctggagtaggatatattaaagtctttacagatttcgtccgattcaaataaatcactaaataatatcccacattatcatctgttagagtagtatcattaaatctattatattttatgaaagatatatcactgctcacctctatatttcgtacatttttaaactgtttgtataatatctctctgatacaatcagatatatctattgtgtcggtagacgataccgttacatttgaattaatggtgttccattttacaacttttaacaagttgaccaattcatttctaatagtatcaaactctccatgattaaatattttaatagtatccattttatatcactacggacacaaagtagctgacataaaccattgtataatttttatgttttatgtttattagcgtacacattttggaagttccggcttccatgtatttcctggagagcaagtagatgatgaggaaccagatagtttatatccgtacttgcacttaaagtctacattgtcgttgtatgagtatgatcttttaaacccgctagacaagtatccgtttgatattgtaggatgtggacatttaacaatctgacacgtgggtggatcggaccattctcctcctgaacacaggacactagagttaccaatcaacgaatatccactattgcaactataagttacaacgctcccatcggtataaaaatcctcgtatccgttatgtcttccgttggatatagatggaggggattggcatttaacagattcacaaataggtgcctcgggattccataccatagatccagtagatcctaattcacaatacgatttagattcaccgatcaactgatatccgctattacaagagtacgttatactagagccaaagtctactccaccaatatcaagttggccattatcgatatctcgaggcgatgggcatctccgtttaatacattgattaaagagtgtccatccagtacctgtacatttagcatatataggtcccattttttgctttctgtatccaggtagacatagatattctatagtgtctcctatgttgtaattagcattagcatcagtctccacactattcttaaatttcatattaatgggtcgtgacggaatagtacagcatgatagaacgcatcctattcccaacaatgtcaggaacgtcacgctctccaccttcatatttatttatccgtaaaaatgttatcctggacatcgtacaaataataaaaagcccatatatgttcgctattgtagaaattgtttttcacagttgctcaaaaacgatggcagtgacttatgagttacgttacactttggagtctcatctttagtaaacatatcataatattcgatattacgagttgacatatcgaacaaattccaagtatttgattttggataatattcgtattttgcatctgctataattaagatataatcaccgcaagaacacacgaacatctttcctacatggttaaagtacatgtacaattctatccatttgtcttccttaactatatatttgtatagataattacgagtctcgtgagtaattccagtaattacatagatgtcgccgtcgtactctacagcataaactatactatgatgtctaggcatgggagacttttttatccaacgatttttagtgaaacattccacatcgtttaatactacatatttctcatacgtggtataaactccacccattacatatatatcatcgtttacgaataccgacgcgcctgaatatctaggagtaattaagtttggaagtcttatccatttcgaagtgccgtgtttcaaatattctgccacacccgttgaaatagaaaattctaatcctcctattacatataactttccatcgttaacacaagtactaacttctgattttaacgacgacatattagtaaccgttttccattttttcgttttaagatctacccgcgatacggaataaacatgtctattgttaatcatgccgccaataatgtatagacaattatgtaaaacatttgcattatagaattgtctatctgtattaccgactatcgtccaatattctgttctaggagagtaatgggttattgtggatatataatcagagtttttaatgactactatattatgttttataccatttcgtgtcactggctttgtagatttggatatagttaatcccaacaatgatatagcattgcgcatagtattagtcataaacttgggatgtaaaatgttgatgatatctacatcgtttggatttttatgtatccactttaataatatcatagctgtaacatcctcatgatttacgttaacgtcttcgtgggataagatagttgtcagttcatcctttgataattttccaaattctggatcggatgtcaccgcagtaatattgttgattatttctgacatcgacgcattatatagttttttaattccatatcttttagaaaagttaaacatccttatacaatttgtgaaattaatattatgaatcatagtttttacacatagatctactacaggcggaacatcaattattatggcagcaactagtatcatttctacattgtttatggtgatgtttatcttcttccagcgcatatagtctaatagcgattcaaacgcgtgatagtttataccattcaatataatcgcttcatcctttagatggtgatcctgaatgcgtttaaaaaaattatacggagacgccgtaataatttccttattcacttgtataatttccccattgatagaaaatattacgctttccattcttaaagtactataagtaattatagtataatgtaaacgtttatatattcaatatttttataaaaatcattttgacattaattcctttttaaatttccgtctatcatctatagaaacgtattctatgaatttataaaatgcttttacgtgtcctatcgtaggcgatagaaccgctaaaaagcctatcgaatttctacaaaagaatctgttatatggtatagggagagtataaaacattaaatgtccgtacttattaaagtattcagtagccaatcctaactctttcgaatacttattaatggctcttgttctgtacgaatctatttttttgaacaacggacctagtggtatatcttgttctatgtatctaaaataatgtctgactagatccgttagtttaatatccgcagtcatcttgtctagaatggcaaatctaactgcgggtttaggctttagtttagtttctatatctacatctatgtctttatctaacaccaaaaatataatagctaatattttattacaatcatccggatattcttctacgatctcactaactaatgtttctttggttatactagtatagtcactatcggacaaataaagaaaatcagatgatcgatgaataatacatttaaattcatcatctgtaagatttttgagatgtctcattagaatattattagggttagtactcattatcattcggcagctattacttattttattatttttcaccatatagatcaatcattagatcatcaaaatatgtttcaatcatcctaaagagtatggtgaatgactcttcccatctaatttctgaacgttcaccaatgtctctagccactttggcactaatagcgatcattcgcttagcgtcttctatattattaactggttgatttaatctatctagcaatggaccgtcggacagcgtcattctcatgttcttaatcaatgtacatacatcgccgtcatctaccaattcatccaacaacataagctttttaaaatcatcattataataggtttgatcgttgtcatttctccaaagaatatatctaataagtagagtcctcatgcttagttaacaactattttttatgttaaatcaattagtacaccgctatgtttaatacttattcatattttagtttttaggattgagaatcaatacaaaaaattaatgcatcattaattttagaaatacttagtttccacgtagtcaatgaaacatttgaactcatcgtacaggacgttctcgtacaggacgtaactataaaccggtttatatttgttcaagatagatacaaatccgataactttttttacgaattctacgggatccactttaaaagtgtcataccgggttctttttatttttttaaacagatcaatggtgtgatgttgattaggtcttttacgaatttgatatagaatagcgtttacatatcctccataatggtcaatcgccatttgttcgtatgtcataaattctttaattatatgacactgtgtattatttagttcatccttgttcattgttaggaatctatccaaaatggcaattatactagaactataggtgcgttgtatacacatattgatgtgtctgtttatacaatcaatgctactaccttcgggtaaaattgtagcatcatataccatttctagtactttaggttcattattatccattgcagaggacgtcatgatcgaatcataaaaaaatatattatttttatgttattttgttaaaaataatcatcgaatacttcgtaagatactccttcatgaacataatcagttacaaaacgtttatatgaagtaaagtatctacgatttttacaaaagtccggatgcataagtacaaagtacgcgataaacggaataataatagatttatctagtctatctttttctatagctttcatagttagatacatggtctcagaagtaggattatgtaacatcagcttcgataaaatgactgggttatttagtcttacacattcgctcatacatgtatgaccgttaactacagagtctacactaaaatgattgaacaatagatagtctaccattgtttcgtattcagatagtacagcgtagtacatggcatcttcacaaattatatcattgtctaatagatatttgacgcatcttatggatcccacttcaacagccatcttaaaatcggtagaatcatattgctttcctttatcattaataatttctagaacatcatctctatcataaaagatacaaatattaactgtttgatccgtaataacattgctagtcgatagcaatttgttaataagatgcgctgggctcaatgtcttaataagaagtgtaagaggactatctccgaatttgttttgtttattaacatccgttgatggaagtaaaagatctataatgtctacattcttgactgttttagagcatacaatatggagaggtgtatttccatcatgatctggttttgagggactaattcctagtttcatcatccatgagattgtagaagcttttggattgtctgacataagatgtctatgaatatgatttttgccaaatttatccactatcctggcttcgaatccgatggacattatttttttaaacactctttctgaaggatctgtacacgccaacaacggaccacatccttcttcatcaaccgagttgttaatcttggctccatactgtaccaataaatttattctctctatgacttcatcatctgttcccgagagataatatagaggcgttttatgctgtttatcacacgcgtttggatctgcgccgtgcgtcagcagcatcgcgactattctattattattaattttagaagctatatgcaatggataatttccatcatcatccgtctcatttggagagtatcctctatgaagaagttcttcgacaaatcgttcatctagtcctttaattccacaatacgcatgtagaatgtgataattatttccagaaggttcgatagcttgtagcatattcctaaatacatctaaatttttactattatatttggcataaagagatagataatactcggccgacataatgttgtccattgtagtataaaaattaatatttctatttctgtatatttgcaacaatttactctctataacaaatatcataacttagttcttttatgtcaagaaggcactggtttagttcatctataaatgtcacgccataactaccacgcatgccatactcagaattatgataaagatatttatccttggggtgtaggtaatggggattaatctttgttggatcagtctctaagttaacacatgtcacacatgatccatttatagttatatcacacgatgatgatttatgaattgattccggaagatcgctatcgtattttgtggttccacaattcatttccatacatgttattgtcacactaatattatgatgaactttatctagccgctgagtggtaaacaacagaacagatagtttattatctttaccaacaccctcagccgctgccacaaatctctgatccgtatccatgatggtcatgtttatttctagtccgtatccagtcaacactatgttagcatttctgtcgatatagctttcactcatatgacactcaccaataatagtagaattaatgtcgtaatttacaccaatagtgagttcggcggcaaagtaccaataccggtaatcttgtcgaggaggacatatagtattcttgtattctaccgaatacccgagagatgcgatacaaaagagcaagactaatttgtaaaccatcttactcaaaatatgtaacaatagtacgatgcaatgagtaagacaataggaaatctatcttatatacacataattattctatcaattttaccaattagttagtgtaatgttaacaaaaatgtgggagaatctaattagtttttctttacacaattgacgtacatgagtctgagttccttgtttttgctaattatttcatccaatttattattcttgacgatatcgagatcttttgtataggagtcaaacttgtattcaacatgcttttctataatcattttagctatttcggcatcatccaatagtacattttccagattagcagaatagatattaatgtcgtatttgaacagagcctgtaacatctcaatgtctttattatctatagccaatttaatgtccggaatgaagagaagggaattattggtgtttgtcgacgtcatatagtcgagcaagagaatcatcatatccacgtgtccattttttatagtgatgtgaatacaactaaggagaatagccagatcaaaagtagatggtatctctgaaagaaagtaggaaacaatacttacatcattaagcatgacggcatgataaaatgaagttttccatccagttttcccatagaacatcagtctccaatttttcttaacaaacagttttaccgtttgcatgttaccactatcaaccgcataatacaatgcggtgtttcccttgtcatcaaattgtgaatcatccagtccactgaatagcaaaatctttactattttggtatcttccaatgtggctgcctgatgtaatggaaattcattctctagaagatttttcaatgctccagcgttcaacaacgtacatactagacgcacgttattatcagctattgcataatacaaggcactatgtccatggacatccgccttaaatgtatctttactagagagaaagcttttcagctgcttagacttccaagtattaattcgtgacagatccatgtctgaaacgagacgctaattagtgtatattttttcattttttataattttgtcatattgcaccagaattaataatatctttaatagatctgattagtagatacatggctatcgcaaaacaacatatacacatttaataaaaataatatttattaagaaaattcagatttcacgtacccatcaatataaataaaataatgattccttacaccgtacccatattaaggagattccaccttacccataaacaatataaatccagtaatatcatgtctgatgatgaacacaaatggtgtattaaattccagtttttcaggagatgatctcgccgtagctaccataatagtagatgcctctgctacagttccttgttcgtcgacatctatctttgcattctgaaacattttataaatatataatgggtccctagtcatatgtttaaacgacgcattatctggattaaacatactaggagccatcatttcggctatcgacttaatatccctcttattttcgatagaaaatttagggagtttaagattgtacactttattccctaattgagacgaccaatagtctaattttgcagccgtgatagaatctgtgaaatgggtcatattatcacctattgccaggtacatactaatattagcatccttatacggaaggcgtaccatgtcatattctttgtcatcgattgtgattgtatttccttgcaatttagtaactacgttcatcatgggaaccgttttcgtaccgtacttattagtaaaactagcattgcgtgttttagtgatatcaaacggatattgccatatacctttaaaatatatagtattaatgattgcccatagagtattattgtcgagcatattagaatctactacattagacataccggatctacgttctactatagaattaattttattaaccgcatctcgtctaaagtttaatctatataggccgaatctatgatattgttgataatacgacggtttaatgcacacagtattatctacgaaactttgataagttagatcagtgtacgtatatttagatgttttcagcttagctaatcctgatattaattctgtaaatgctggacccagatctctttttctcaaatccatagtcttcaataattctattctagtattacctgatgcaggcaatagcgacataaacatagaaaacgaataaccaaacggtgagaagacaatattatcatcttgaatatttttatacgctactataccggcattggtaaatccttgtagacgataggcggacgctgaacacgctaacgatagtatcaataacgcaatcatgattttatggtattaataattaaccttatttttatgttcggtataaaaaaattattgatgtctacacatccttttgtaattgacatctatatatccttttgtataatcaactctaatcactttaacttttacagttttccctaccagtttatccctatattcaacatatctatccatatgcatcttaacactctctgccaagatagcttcagagtgaggatagtcaaaaagataaatatatagagcataatcattctcgtatactctgccctttattacatcacccgcattgggcaacgaataacaaaatgcaagcatcttgttaacgggctcgtaaattgggataaaaattatgtttttattgtcttatatctattttattcaagagaatattcaggaatttctttttccggttgtatctcgtcgcagtatatatcatttgtacattgtttcatattttttaatagtttacaccttttagtaggactagtatcgtacaattcatagctgtattttgaattccaatcacgcataaaaatatcttccaattgttgacgaagacctaatccatcatccggtgtaatattaatagatgctccacatgtatccgtaaagtaatttcctgtccaatttgaggtacctatataggccgttttatcggttaccatatatttggcatggtttaccctagaatacggaatgggaggatcagcatctggtacaataaatagctttacttctatatttatgtttttagattttagcatagcgatagatcttaaaaagtttctcatgataaacgaagatcgttgccagcaactaatcaatagcttaacggatacttgtctgtctatagcggatcttcttaattcatcttctatataaggccaaaacaaaattttacccgccttcgaataaataatagggataaagttcataacagatacataaacgaatttactcgcatttctaatacatgacaataaagcggttaaatcattggttctttccatagtacatagttgttgcggtgcagaagcaataaatacagagtgtggaacgccgcttacgttaatactaagaggatgatctgtattataatacgacggataaaagtttttccaattatatggtagattgttaactccaagataccagtatacctcaaaaatttgagtgagatccgctgccaagttcctattattgaagatcgcaatacccaattccttgacctgagttagtgatctccaatccatgttagcgcttcctaaataaatatgtgtattatcagatatccaaaattttgtatgaagaactcctcctaggatatttgtaatatctatgtatcgtacttcaactccggccatttgtagtctttcaacatcctttaatggtttgttagatttattaacggctactctaactcgtactcctcttttgggtaattgtacaatctcgtttaatattatcgtgccgaaattcgtacccacttcatccgataaactccaataaaaagatgatatatctagtgtttttgtggtattggatagaatttccctccacatgttaaatgtagacaaatatactttatcaaattgcatacctataggaatagtttctgtaatcactgcgattgtattatccggattcattttatttgttaaaagaataatcctatatcacttcactctattaaaaatccaagtttctatttctttcatgactgattttttaacttcatccgtttccttatgaagatgatgtttggcaccttcataaatttttatttctctattacaatttgcatgttgcatgaaataatatgcacctaaaacatcgctaatcttattgtttgttccctggagtatgagagtcgggggggtgttaatcttggaaattatttttctaaccttgttggtagccttcaagacctgactagcaaatccagccttaattttttcatgattgactaatgggtcgtattggtatttataaactttatccatatctctagatactgattctggacatagctttccgactggcgcatttggtgtgatggttcccataagtttggcagctagcagattcagtcttgaaacagcatctgcattaactagaggagacattagaatcattgctgtaaacaagtttggattatcgtaagaggctagctcccatggaatgacccaataagtagatttaatagttaccacgtgctgtaccaaagtcatcaatcatcattttttcaccattacttcttccatgtccaatatgatcatgtgagaatactaaaattcctaacgatgatatgttttcagctagttcgtcataacgtccagaatgtttaccagctccatgacttatgaatactaatgccttaggatatgtaataggtttccaatatttacaatatatgtaatcattgtccagattgaacatacagtttgcactcatgattcacgttatataactatcaatattaacagttcgtttgatgatcatattatttttatgttttattgataattgtaaaaacatacaattaaatcaatatagaggaaggagacggctactgtcttttgtaagatagtcatggcgactaaattagattatgaggatgctgttttttactttgtggatgatgataaaatatgtagtcgcgactccatcatcgatctaatagatgaatatattacgtggagaaatcatgttatagtgtttaacaaagatattaccagttgtggaagactgtacaaggaattgatgaagttcgatgatgtcgctatacggtactatggtattgataaaattaatgagattgtcgaagctatgagcgaaggagaccactacatcaattttacaaaagtccatgatcaggaaagtttattcgctaccataggaatatgtgctaaaatcactgaacattggggatacaaaaagatttcagaatctagattccaatcattgggaaacattacagatttgatgaccgacgataatataaacatcttgatactttttctagaaaaaaaattgaattgatgatataggggtcttcataacgcataattattacgttagcattctatatccgtgttaaaaaaaattatcctatcatgtatttgagagttttatatgtagcaaacatgatagctgtgatgccaataagctttagatattcacgcgtgctagtgttagggatggtattatctggtggtgaaatgtccgttatataatctacaaaacaatcatcgcatatagtatgcgatagtagagtaaacatttttatagtttttactggattcatacatcgtctacccaattcggttataaatgaaattgtcgccaatcttacacccaaccccttgttatccattagcatagtattaacttcgttatttatgtcataaactgtaaatgattttgtagatgccatatcatacatgatattcatgtccctattataatcattactaactttatcacaatatatgttgataatatctatatatgatctagtctttgtgggcaactgtctatacaagtcgtctaaacgttgtttactcatatagtatcgaacagccatcattacatggtcccgttccgttgatagataatcgagtatgttagtggacttgtcaaatctatataccatattttctggaagtggatatacatagtcgtgatcaacattattgctagcctcatcttctatatcctgtactataccattatctatatcatctacataatctatgatattattacacataaacatcgacaacatactattgtttattatctaagtcctgttgatccaaacccttgatctcctctatttgtactatctagagattgtacttcttccagttctggataatatatacgttgatagattagctgagctattctatctccagtatttacattaaacgtacattttccattattaataagaatgactcctatgtttcccctataatcttcgtctattacaccacctcctatatcaatgccttttagtgacagaccagacctaggagctattctaccatagcagaacttaggcatggacatactaatatctgtcttaattaactgtctttctcctggagggatagtataatcgtaagcgctatacaaatcatatccggcagcacccggcgattgcctagtaggagatttagctctgttagtttccttaacaaatctaactggtgagttaatattcatgttgaacataaaactaatattttatttcaaaattatttaccatcccatatattccatgaataagtgtgatgattgtacacttctatagtatctatatacgatccacgataaaatcctcctatcaatagcagtttattatccactatgatcaattctggattatccctcggataaataggatcatctatcagagtccatgtattgctggattcacaataaaattccgcatttctaccaaccaagaataaccttctaccgaacactaacgcgcatgatttataatgaggataataagtggatggtccaaactgccactgatcatgattgggtagcaaatattctgtagttgtatcagtttcagaatgtcctcccattacgtatataacattgtttatggatgccactgctggattacatctaggtttcagaagactcggcatattaacccaagcagcatccccgtggaaccaacgctcaacagatgtgggatttggtagacctcctactacgtataatttattgttagcgggtatcccgctagcatacagtctggggctattcatcggaggaattggaatccaattgtttgatatataatttaccgctatagcattgttatgtatttcattgttcatccatccaccgatgagatatactacttctccaacatgagtacttgtacacatatggaatatatctataatttgatccatgttcataggatactctatgaatggatacttgtatgatttgcgtggttgtttatcacaatgaaatattttggtacagtctagtatccattttacattatttatacctctgggagaaagataatttgacctgattacatttttgataaggagtagcagatttcctaatttatttcttcgctttatataccacttaatgacaaaatcaactacataatcctcatctggaacatttagttcatcgctttctagaataagtttcatagatagataatcaaaattgtctatgatgtcatcttccagttccaaaaagtgtttggcaataaagtttttagtatgacataagagattggatagtccgtattctatacccatcatgtaacactcgacacaatattcctttctaaaatctcgtaagataaagtttatacaagtgtagatgataaattctacagaggttaatatagaagcacgtaataaattgacgacgttatgactatctatatatacctttccagtatacgagtaaataactatagaagttaaactgtgaatgtcaaggtctagacaaaccctcgtaactggatctttatttttcgtgtatttttgacgtaaatgtgtgcgaaagtaaggagataactttttcaatatcgtagaattgactattatattgcctcctatggcatcaataattgttttgaatttcttagtcatagacaatgctaatatattcttacagtacacagtattgacaaatatcggcatttatgtttctttaaaagtcaacatctagagaaaaatgattatctttttgagacataactcccattttttggtattcacccacacgtttttcgaaaaaattagtttttccttccaatgatatattttccatgaaatcaaacggattggtaacattataaatttttttaaatcccaattcagaaatcaatctatccgcgacgaattctatatatgttttcatcatttcacaattcattcctataagtttaactggaagagccgcagtaagaaattcttgttcaatggatactgcatctgttataatagatctaacggtttcttcactcggtggatgcaataaatgtttaaacatcaaacatgcgaaatcgcagtgcagaccctcgtctctactaattagttcgttggaaaacgtgagtccgggcattaggccacgctttttaagccaaaatatggaagcgaatgatccggaaaagaagattccttctactgcagcaaaggcaataagtctctctccataaccggcgctgtcatgtatccacttttgagcccaatcggccttcttttttacacaaggcatcgtttctatggcattaaagagatagtttttttcattactatctttaacataagtatcgatcaaaagactatacatttccgaatgaatgttttcaatggccatctgaaatccgtagaaacatctagcctcggtaatctgtacttctgtacaaaatcgttccgccaaattttcattcactattccgtcactggctgcaaaaaacgccaatacatgttttataaaatatttttcgtctggtgttagtttattccaatcattgatatctttagatatatctacttcttccactgtccaaaatgatgcctctgcctttttatacatgttccagatgtcatgatattggattgggaaaataacaaatctatttggatttggtgcaaggatgggttccataactaaattaacaataacaataaattttttttcagttatctatatgcctgtacttggattttttgtacatcgatatcgccgcaatcactacaataattacaagtattattgatagcattgttattagtactatcataattaaattatctacattcatgggtgctgaataatcgttattatcatcattatcattttgtaattgtgacatcatactagataaatcgtttgcgagattgttgtgggaagcgggcatggaggatgcattatcattattatttaacgccttccatttggattcacaaatgttacgcacattcaacattttatggaaactataattttgtgaaaacaaataacaagaaaactcgtcatcgttcaaatttttaacgatagtaaaccgattaaacgtcgagctaatttctaacgctagcgactctgttggatatgggtttccagatatatatcttttcagttcccctacgtatctataatcatctgtaggaaatggaagatatttccatttatctactgttcctaatatcatatgtggtggtgtagtagaaccattaagcgcgaaagatgttatttcgcatcgtattttaacttcgcaataatttctggttagataacgcactctaccagtcaagtcaatgatattagcctttacagatatattcatagtagtcgtaacgatgactccatcttttagatgcgatactcctttgtatgtaccagaatcttcgtacctcaaactcgatatatttaaacaagttaatgagatattaacgcgttttatgaatgatgatatataaccagaagttttatcctcggtggctagcgctataaccttatcattataataccaactagtgtgattaatatgtgacacgtcagtgtgggtacaaatatgtacattatcgtctacgtcgtattcgatacatccgcatacagccaacaaatataaaatgacaaatactctaacgccgttcgtacccatcttgatgcggtttaataaatgttttgatttcaatttattgtaaaaaaagattcggttttatactgttcgatattctcattgcttatattttcatctatcatctccacacagtcaaatccgtggttagcatgcacctcatcaaccggtaaaagactatcggactcttctatcattataactctagaatatttaatttggtcattattaatcaagtcaattatcttatttttaacaaacgtgagtattttactcattttttataaaaacttttagaaatatacagactctatcgtgtgtctatatcttctttttatatccaatgtatttatgtctgatttttcttcatttatcatatataatggtccaaattctacacgtgcttcggattcatccagatcattaaggttcttataattgtaacatccttctcttccctcttctacatcttccttcttattcttattcttagcgtcacagaatctaccacagcaggatcccatgacgagcgtcatattaaactaatccattttcaattataatatatgattagtaatgaccattaaaataaaaaatattcttcataaccggcaagaaagtgaaaagttcacattgaaactatgtcagtagtatacatcatgaaatgatgatatatatatactctattttggtggaggattatatgatataattcgtggataatcatttttaagacacatttctttattcgtaaatcttttcacgttaaatgagtgtccatattttgcaatttcttcatatgatggcggtgtacgtggacgaggctgctcctgttcttgttgtggtcgccgactgtcgtgtctgcgtttagatccctccattatcgcgattgcgtagatggagtactattttataccttgtaattaaatttttttattaattaaacgtataaaaacgttccgtatctgtatttaagagccagatttcgtctaatagaacaaatagctacagtaaaaataactagaataattgctacacccactagaaaccacggatcgtaatacggcaatcggttttcgataataggtggaacgtatattttatttaaggacttaacaattgtctgtaaaccacaatttgcttccgcggatcctgtattaactatctgtaaaagcatatgttgaccgggcggagccgaacattctccgatatctaatttctgtatatctataatattattaacctccgcatacgcattacagttcttttctagcttggataccgcactaggtacatcgtctagatctattcctatttcctcagcgatagctcttctatccttttccggaagcaatgaaatcacttcaataaatgattcaaccatgagtgtgaaactaagtcgagaattactcatgcatttgttagttattcggagcgcgcaatttttaaactgtcctataacctctcctatatgaatagcacaagtgacattagtagggatagaatgttgagctaatttttgtaaataactatctataaaaagattatacaaagttttaaactctttagtttccgccatttatccagtctgagaaaatgtctctcataataaatttttccaagaaactaattgggtgaagaatggaaacctttaatctatatttatcacagtctgttttggtacacatgatgaattcttccaatgccgtactaaattcgatatctttttcgatttctggatatgtttttaataaagtatgaacaaagaaatggaaatcgtaataccagttatgtttaactttgaaattgttttttattttcttgttaatgattccagccacttgggaaaagtcaaagtcgtttaatgccgatttaatacgttcattaaaaacaaactttttatcctttagatgaattattattggttcattggaatcaaaaagtaagatattatcgggtttaagatctgcgtgtaaaaagttgtcgcaacagggtagttcgtagattttaatgtataacagagccatctgtaaaaagataaactttatgtattgtaccaaagatttaaatcctaatttgatagctaactcggtatctactttatctgccgaatacagtgctaggggaaaaattataatgtttcctctttcatattcgtagttagttctcttttcatgttcgaaaaagtgaaacatgcggttaaaatagtttataacattaatattactgttaataactgccggataaaagtgggatagtaatttcacgaatttgatactgtcctttctctcgttaaacgcctttaaaaaaactttagaagaatatctcaatgagagttcctgaccatccatagtttgtatcaataatagcaacatatgaagaacacgtttatacagagtatgtaaaaatgttaatttatagtttaatcccatggcccacgcacacacgattaattttttttcatctccctttagattgttgtatagaaatttgggtactgtgaactccgccgtagtttccatgggactatataattttgtggcctcgaatacaaattttactacatagttatctatcttaaagactataccatatcctcctgtagatatgtgataaaaatcgtcgtttataggataaaatcgtttatccttttgttggaaaaaggatgaattaatgtaatcattctcttctatctttagtagtgtttccttattaaaattcttaaaataatttaacaatctaactgacggagcccaattttggtgtaaatctaattgggacattatattgttaaaatacaaacagtctcctaatataacagtatctgataatctatggggagacatccattgatattcaggggatgaatcattggcaacacccatttattgtacaaaaagccccaatttacaaacgaaagtccaggtttgatagagacaaacaattaactattttgtctctgtttttaacacctccacagtttttaatttctttagtaatgaaattattcacaatatcagtatcttctttatctaccagagattttactaacttgataaccttggctgtctcattcaatagggtagtaatatttgtatgtgtgatattgatatctttttgaattgtttcttttagaagtgattctttgatggtgccagcatacgaattacaataatgcagaaactcggttaacatgcaggaattatagtaagccaattccaattgttgcctgtgttgtattagagtgtcaatatgagcaatggtgtccttgcgtttctctgatagaatgcgagcagcgattttggcgttatcatttgacgatatttctggaatgacgaatcctgtttctactaactttttggtaggacaaagtgaaacaatcaagaagatagcttctcctcctatttgtggaagaaattgaactcctctagatgatctactgacgatagtatctccttgacagatattggaccgaattacagaagtacctggaatgtaaagccctgaaaccccctcattttttaagcagattgttgccgtaaatcctgcactatgcccaagatagagagctcctttggtgaatccatctctatgtttcagtttaaccaagaaacagtcagctggtctaaaatttccatctctatctaatacagcatctaacttgatgtcaggaactatgaccggtttaatgttatatgtaacattgagtaaatccttaagttcataatcatcactgtcatcagttatgtacgatccaaacaatgtttctaccggcatagtggatacgaagatgctatccatcagaatgtttccctgattagtattttctatatagctattcttctttaaacgattttccaaatcagtaactatgttcatttttttaggagtaggacgcctagccagtatggaagaggattttctagatcctctcttcaacatctttgatctcgatggaatgcaaaaccccatagtgaaacaaccaacgataaaaataatattgtttttcactttttataattttaccatctgactcatggattcattaatatctttataagagctactaacgtataattctttataactgaactgagatatatacaccggatctatggtttccataattgagtaaatgaatgctcggcaataactaatggcaaatgtatagaacaacgaaattatactagagttgttaaagttaatattttctatgagctgttccaataaattatttgttgtgactgcgttcaagtcataaatcatcttgatactatccagtaaaccgtttttaagttctggaatattatcatcccattgtaaagcccctaattcgactatcgaatatcctgctctgatagcagtttcaatatcgacggacgtcaatactgtaataaaggtggtagtattgtcatcatcgtgataaactacgggaatatggtcgttagtaggtacggtaactttacacaacgcgatatataactttccttttgtaccatttttaacgtagttgggacgtcctgcagggtattgttttgaagaaatgatatcgagaacagatttgatacgatatttgttggattcctgattattcactataatataatctagacagatagatgattcgataaatagagaaggtatatcgttggtaggataatacatccccattccagtattctcggatactctattgatgacactagttaagaacatgtcttctattctagaaaacgaaaacatcctacatggactcattaaaacttctaacgctcctgattgtgtctcgaatgcctcgtacaaggatttcaaggatgccatagattctttgaccaacgatttagaattgcgtttagcatctgatttttttattaaatcgaatggtcggctctctggtttgctaccccaatgataacaatagtcttgtaaagataaaccgcaagaaaatttatacgcatccatccaaataaccctagcaccatcggatgatattaatgtattattatagattttccatccacagttattgggccagtatactgttagcaacggtatatcgaatagattactcatgtaacctactagaatgatagttcgtgtactagtcataatatctttaatccaatctaagaaatttaaaattagattttttacactgttaaagttaacaaaggtattacccggatacgtggatatcatatatggcattggtccattatcagtaatagctccataaactgatacggcgatggtttttatatgtgtttgatctaacgaggaagaaattcgcgcccacaattcatctctagatatgtatttaatatcaaacggtaacacatcaatttcgggacgcgtatatgtttctaaatttttaatccaaatataatgatgacctatatgccctattatcatactgtcaactatagtacacctagagaacttacgatacatctgtttcctgtaatcgttaaattttacaaatctataacatgctaaaccttttgacgacagccattcattaatttctgatatggaatctgtattctcgataccgtatcgttctaaagccagtgctatatctccctgttcgtgggaacgctttcgtataatatcgatcaacggataatctgaagtttttggagaataatatgactcatgatctatttcgtccataaacaatctagacataggaattggaggcgatgatcttaattttgtgcaatgagtcgtcaatcctataacttctaatcttgtaatattcatcatcgacataatactatctatgttatcatcgtatattagtataccatgaccttcttcatttcgtgccaaaatgatatacagtcttaaatagttacgcaatatctcaatagtttcataattgttagctgttttcatcaaggtttgtatcctgtttaacatgatggcgttctataacgtctctattttctatttttaattttttaaatttttaacgatttactgtggctagatacccaatctctctcaaatatttttttagcctcgcttacaagctgtttatctatactattaaaactgacgaatccgtgattttggtaatgggttccgtcgaaatttgccgaagtgatatgaacatattcgtcgtcgactatcaacaattttgtattattctgaatagtgaaaaccttcacagatagatcattttgaacacacaacgcatctagacttttggcggttgccatagaatatacgtcgttcttatcccaattaccaactagaagtctgatcttaactcctctattaatggctgcttctataatggagttgtaaatgtcgggccaatagtagctattaccgtcgacacgtgtagtgggaactatggccaaatgttcaatatctatactagtcttagctgacctgagtttatcaataactacatcggtatctagatctctagaatatcccaataggtgttccggagaatcagtaaagaacactccacctataggattcttaatatgatacgcagtgctaactggcaaacaacaagccgcagagcataaattcaaccatgaattttttgcgctattaaaggctttaaaagtatcaaatcttctacgaagatctgtggccagcgggggataatcagaatatacacctaacgttttaatcgtatgtatagatcctccagtaaatgacgcgtttcctacataacatctttcatcatctgacacccaaaaacaaccgagtagtagtcccacattattttttttatctatattaacggttataaaatttatatccgggcagtgactttgtagctctcccagatttcttttccctcgttcatctagcaaaactattattttaatccctttttcagatgcctcttttagtttatcaaaaataagcgctcccctagtcgtactcagaggattacaacaaaaagatgctatgtatatatatttcttagctagagtgataatttcgttaaaacattcaaatgttgttaaatgatcggatctaaaatccatattttctggtagtgtttctaccagcctacattttgctcccgcaggtaccgatgcaaatggccacatttagttaacataaaaacttatacatcctgttctatcaacgattctagaatatcatcggctatatcgctaaaattttcatcaaagtcgacatcacaacctaactcagtcaatatattaagaagttccatgatgtcatcttcgtctatttctatatccgtatccattgtagattgttgaccgattatcgagtttaaatcattactaatactcaatccttcagaatacaatctgtgtttcattgtaaatttataggcggtgtatttaagttggtagattttcaattatgtattaatatagcaacagtagttcttgctcctccttgattctagcatcctcttcattattttcttctacgtacataaacatgtccaatacgttagacaacacaccgacgatggcggccgctacagacacgaatatgactaaaccgatgaccatttaaaaacccctctctagctttcacttaaactgtatcgatcattcttttagcacatgtataatataaaaacattattctatttcgaatttaggcttccaaaaatttttcatccgtaaaccgataataatatatatagacttgttaatagtcggaataaatagattaatgcttaaactatcatcatctccacgattagagatacaatatttacattctttttgctgtttcgaaactttatcaatacacgttaatacaaacccaggaaggagatattgaaactgaggctgttgaaaatgaaacggtgaatacaataattcagataatgtaaaatcatgattccgtattctgatgatattagaactgctaatggatgtcgatggtatgtatctaggagtatctattttaacaaagcatcgatttgctaatatacaattatccttttgattaattgttattttattcatattcttaaaaggtttcatatttatcaattcttctacattaaaaatttccatttttaatttatgtagccccgcaatactcctcattacgtttcattttttgtctataatatccattttgttcatctcggtacatagattatccaattgagaagcgcatttagtagttttgtacattttaagtttattgacgaatcgtcgaaaactagttatagttaacattttattatttgataccctgatattaatacccctgccgttactattatttataactgatgtaatccacgtaacattggaattaactatcgatagtaatgcatcgacgcttccaaaattgtctattataaactcaccgataatttttttattgcatgttttcatattcattaggattatcaaatctttaatcttattacgattgtatgcgttgatattacaagacgtcattctaaaagacggaggatctccatcaaatgccagacaatcacgtacaaagtacatggaaataggttttgttctattgcgcatcatagatttatatagaacacccgtagaaatactaatttgttttactctataaaatactaatgcatctatttcatcgttttgtataacgtctttccaagtgtcaaattccaaatttttttcattgatagtaccaaattcttctatctctttaactacttgcatagataggtaattacagtgatgcctacatgccgttttttgaaactgaatagatgcgtctagaagcgatgctacgctagtcacaatcaccactttcatatttagaatatatatatgtaaaaatatagtagaatttcattttgtttttttctatgctataaatgaattctcattttgcatctgctcatactccgttttatattaataccaaagaaggaagatatctggttctaaaagccgttaaagtatgcgatgttagaactgtagaatgcgaaggaagtaaagcttcctgcgtactcaaagtagataaaccctcatcgcccgcgtgtgagagaagaccttcgtccccgtccagatgcgagagaatgaataaccctggaaaacaagttccgtttatgaggacggacatgctacaaaatatgttcgcggctaatcgcgataatgtagcttctagacttttgtcctaaaatactattatatccttttcgatattaataaatccgtgtcgtccaggttttttatctctttcagtatgtgaatagataggtattttatctctattcatcatcgaatttaagagatccgataaacattgtttgtattctccagatgtcagcatctgatacaacaatatatgtgcacataaacctctggcacttatttcatgtaccttccccttatcactaaggagaatagtatttgagaaatatgtatacatgatattatcatgaattagatatacagaatttgtaacactctcgaaatcacacgatgtgtcggcgttaagatctaatatatcactcgataacacattttcatctagatacactagacattttttaaagctaaaatagtctttagtagtaacagtaactatgcgattattttcatcgatgatacatttcatcggcatattattacgcttaccatcaaagactataccatgtgtatatctaacgtattctagcatggttgccatacgcgcattaaacttttcaggatctttggatagatcttccaatctatctatttgagaaaacatttttatcatgttcaatagttgaaacgtcggatccactatatagatattatctataaagattttaggaactacgttcatggtatcctggcgaatattaaaactatcaatgatatgattatcgttttcatcttttatcaccatatagtttctaagatatgggattttacttaatataatattatttcccgtgataaattttattagaaaggccaaatctataagaaaagtcctagaattagtctgaagaatatctatatcgccgtatagtatatttggattaattagatatagagaatatgatccgtaacatatacaacttttattatggcgtctaagatattcttccatcaacttattaacatttttgactagggaagatacattatgacgtcccattacttttgccttgtctattactgcgacgttcatagaatttagcatatctcttgccaattcttccattgatgttacattataagaaattttagatgaaattacatttggagctttaatagtaagaactcctaatatgtccgtgtatgtggtcactaatacagattgtagttctataatcgtaaataatttacctatattatatgtttgagtctgtttagaaaagtagctaagtatacgatcttttatttctgatgcagatgtattaacatcggaaaaaaatctttttttattcttttttactaaagatacaaatatgtctttgttaaaaacagttattttctgaatatttctagcttgtaattttaacatatgatattcgttcacactaggtactctgcctaaataggtttctataatctttaatgtaatattaggaaaagtattctgatcaggattcctattcattttgaggatttaaaactctgattattgtctaatatggtctctacgcaaactttttcacagagcgatagagtttttgataactcgtttttcttaagaaatataaaactactgtctccagagctcgctctatcttttattttatctaattcgatacaaactcctgatactggttcagaaagtaattcattaattttcagtcctttatagaagatatttaatatagataatacaaaatcttcagtttttgatatcgatctgattgatcctagaactagatatattaataacgtgctcattaggcagtttatggcagcttgataattagatatagtatattccagttcatatttattagataccgcattgcccagattttgatattctatgaattcctctgaaaataaatccaaaataactagacattctattttttgtggattagtgtactctcttccctctatcatgttcactactggtgtccacgatgataaatatctagagggaatataatatagtccataggatgccaatctagcaatgtcgaataactgtaattttattcttcgctcttcattatgaattgattcttgaggtataaacctaacacaaattatattattagacttttcgtatgtaatgtctttcatgttataagtttttaatcctggaatagaatctattttaatgaggcttttaaacgcagagttctccaacgagtcaaagcataatactctgttgtttttcttatatacgatgttacgattttcttctttgaatggaataggtttttgaattagtttataattacaacataatagataaggaagtgtgcaaatagtacgcggaaaaaacataatagctcccctgttttcatccatggttttaagtaaatgatcactggcttctttagtcaatggatattcgaacattaaccgtttcatcatcattggacagaatccatatttcttaatgtaaagagtgatcaaatcattgtgtttattgtaccatcttgttgtaaatgtgtattcggttatcggatctgctcctttttctattaaagtatcgatgtcgatctcgtctaagaattcaactatatcgacatatttcatttgtatacacataaccattactaacgtagaatgtataggaagagatgtaacgggaacagggtttgttgattcgcaaactattctaatacataattcttctgttaatacgtcttgcacgtaatctattatagatgccaagatatctatataattattttgtaagatgatgttaactatgtgatctatataagtagtgtaataattcatgtatttcgatatatgttccaactctgtctttgtgatgtctagtttcgtaatatctatagcatcctcaaaaaatatattcgcatatattcccaagtcttcagttctatcttctaaaaaatcttcaacgtatggaatataataatctattttacctcttctgatatcattaatgatatagtttttgacactatcttctgtcaattgattcttattcactatatctaagaaacggatagcgtccctaggacgaactactgccattaatatctctattatagcttctggacataattcatctattataccagaattaatgggaactattccgtatctatctaacatagttttaagaaagtcagaatctaagacttgatgttcatatattggttcatacatgaaatgatctctattgatgatagtgactatttcattctctgaaaattggtaactcattctatatatgctttccttgttgatgaaggatagaatatactcaatagaatttgtaccaacaaactgttctcttatgaatcgtatatcatcatctgaaataatcatgtaaggcatacatttaacaattagagacttgtctcctgttatcaatatactattcttgtgataatttatgtgtgaggcaaatttgtccacgttctttaattttgttatagtagatatcaaatccaatggagctacagttcttggcttaaacagatatagtttttctggaacaaattctacaacattattataaaggactttgggtaaataagtgggatgaaatcctattttaattaatgcgatagccttgtcctcgtgcagatatccaaacgcttttgtgatagtatggcattcattgtctagaaacgctctacgaatatctgtgacagatatcatctttagagaatatactagtcgcgttaatagtactacaatttgtattttttaatctatctcaataaaaaaattaatatgtatgattcaatgtataactaaactactaactgttattgataactagaatcagaatctaatgatgacgtacccaagaagtttatctactgccaatttagctgcattatttttagcatctcgtttagattttccatctgccttatcgaatactcttccgtcgatatctacacaggcataaaatgtaggagagttactaggcccaactgattcaatacgaaaagaccaatctctcttagttatttggcagtactcattaataacggtgacagggttagcatctttccaatcaataatttttttagccggaataacatcatcaaaagacttatgatcctctctcattgatttttcgcgggatacatcatctattatgacgtcagccataacatcagcatccggcttatccgcctccgttgtcataaaccaacgaggaggaatatcgtcggagctgtacaccatagcactacgttgaagatcgtacagagctttattaacttctcgcttctccatattaagttgtctagttagttgtgcagcagtagctccttcgattccaatggttttaatagcctcacacacaatctctgcgttagaacgttcgtcgatatagattttagacatttttagagagaactaacacaaccagcaataaaactgaacctactttatcatttttttattcatcatcctctggtggttcgtcgttcctatcaaatgtagctctgattaacccgtcatctataggtgatgctggttctggagattctggaggagatggattattatctggaagaatctctgttatttccttgttttcatgtatcgattgcgttgtaacattaagattgcgaaatgctctaaatttgggaggcttaaagtgttgtttgcaatctctacacgcgtgtctaactagtggaggttcgtcagctgctctagtttgaatcatcatcggcgtagtattcctacttttacagttaggacacggtgtattgtatttctcgtcgagaacgttaaaataatcgttgtaactcacatcctttattttatctatattgtattctactcctttcttaatgcattttataccgaataagagatagcgaaggaattctttttcggtgccgctagtacccttaatcatatcacatagtgttttatattccaaatttgtggcaatagacggtttatttctatacgatagtttgtttctggaatcctttgagtattctataccaatattattctttgattcgaatttagtttcttcgatattagattttgtattacctatattcttgatgtagtactttgatgatttttccatggcccattctattaagtcttccaagttggcatcatccacatattgtgatagtaattctcggatatcagtagcggctaccgccattgatgtttgttcattggatgagtaactactaatgtatacattttccatttataacacttatgtattaactttgttcatttatattttttcattattatgttgatattaacaaaagtgaatatatatatatgttaataattgtattgtggttatacggctacaattttataatgagtgaaagtcagtgtccgatgatcaatgacgatagctttactctgaaaagaaagtatcaaatcgatagtgcggagtcaacaataaaaatggataagaagaggataaagtttcagaatagagccaaaatggtaaaagaaataaatcagacaataagagcagcacaaactcattacgagacattgaaactaggatacataaaatttaagagaatgattaggactactactctagaagatatagcaccatctattccaaataatcagaaaacttataaactattctcggacatttcagccatcggcaaagcatcacagaatccgagtaagatggtatatgctctgctgctttacatgtttcccaatttgtttggagatgatcatagattcattcgttatagaatgcatccaatgagtaaaatcaaacacaagatcttctctcctttcaaacttaatcttattagaatattagtggaagaaagattctataataatgaatgcagatctaataaatggaaaataattggaacacaagttgataaaatgttgatagctgaatctgataaatatacaatagatgcaaggtataacctaaaacccatgtatagaatcaagggagaatctgaagaagataccctcttcatcaaacagatggtagaacaatgtgtgacatcccaggaattggtggaaaaagtgttgaagatactgtttagagatttgttcaagagtggagaatacaaagcgtacagatacgatgatgatgtagaaaatggattcattggattggatacactaaaattaaacattgttcatgatatagttgaaccatgtatgcctgttcgtaggccagtggctaagatactgtgtaaagaaatggtaaataaatactttgagaatccgctacatattattggtaaaaatcttcaagagtgcattgactttgttagtgaataggcatttcatctttctccaatactaattcaaattgttaaattaataatggatagtataaatagttattagttataagatagtaaaaataattattagaataagagtgtagtatcatagataactctcttctataaaaatggattttattcgtagaaagtatcttatatacacagtagaaaataatatagattttttaaaggatgatacattaagtaaagtaaacaattttaccctcaatcatgtactagctctcaagtatctagttagcaattttcctcaacacgttattactaaggatgtattagctaataccaatttttttgttttcatacatatggtacgatgttgtaaagtgtacgaagcggttttacgacacgcatttgatgcacccacgttgtacgttaaagcattgactaagaattatttatcgtttagtaacacaatacaatcgtacaaggaaaccgtgcataaactaacacaagatgaaaaatttttagaggttgccgaatacatggacgaattaggagaacttataggcgtaaattatgacttagttcttaatccattatttcacggaggggaacccatcaaagatatggaaatcatttttttaaaactgtttaagaaaacagacttcaaagttgttaaaaaattaagtgttataagattacttatttgggcatacctaagcaagaaagatacaggcatagagtttgcggataatgatagacaagatatatatactctatttcaacaaactggtagaatcgtccatagcaatctaacagaaacgtttagagattatatctttcccggagataagactagctattgggtgtggttaaacgaaagtatagctaatgatgcggatatcgttcttaatagacacgccattaccatgtatgataaaattcttagttatatatactctgagataaaacaaggacgcgttaataaaaacatgcttaagttagtttatatctttgagcctgaaaaagatatcagagaacttctgctagaaatcatatatgatattcctggagatatcctatctattattgatgcaaaaaacgacgattggaaaaaatattttattagtttttataaagctaattttattaacggtaatacatttattagtgatagaacgtttaacgaggacttattcagagttgttgttcaaatagatcccgaatatttcgataatgaacgaattatgtctttattctctacgagtgctgcggacattaaacgatttgatgagttagatattaataacagttatatatctaatataatttatgaggtgaacgatatcacattagatacaatggatgatatgaagaagtgtcaaatctttaacgaggatacgtcgtattatgttaaggaatacaatacatacctgtttttgcacgagtcggatcccatggtcatagagaacggaatactaaagaaactgtcatctataaaatccaagagtagacggctgaacttgtttagcaaaaacattttaaaatattatttagacggacaattggctcgtctaggtcttgtgttagatgattataaaggagacttgttagttaaaatgataaaccatcttaagtctgtggaggatgtatccgcattcgttcgattttctacagataaaaaccctagtattcttccatcgctaatcaaaactattttagctagttataatatttccatcatcgtcttatttcaaaggtttttgagagataatctatatcatgtagaagaattcttggataaaagcatccatctaaccaagacggataagaaatatatacttcaattgataagacacggtagatcatagaacagaccaaatatattattaataatttggtatatacatagatataattatcacacatttttgataaatgggaactgctgcaacaattcagactcccaccaaattaatgaataaagaaaatgcagaaatgattttggaaaaaattgttgatcatatagttatgtatattagtgacgaatcaagtgattcagaaaataatcctgaatatattgattttcgtaacagatacgaagactatagatctctcattataaaaagtgatcacgagtttgtaaagctatgtaaaaatcatgcggagaaaagttctccagaaacgcaacaaatgattatcaaacacatatacgaacaatatcttattccagtatctgaagtactattaaaacctataatgtccatgggtgacataattacatataacggatgtaaagacaatgaatggatgctagaacaactctctaccctaaactttaacaatctccgcacatggaactcatgtagcataggcaatgtaacgcgtctgttttatacattttttagttatctgatgaaagataaactaaatatataagtataatcccattctaatactttaacctgatgtattagcatcttattagaatattaacctaactaaaagacataacataaaaactcattacatagttgataaaaagcggtaggatataaatattatggctgccaccgttccgcgttttgacgacgtgtacaaaaatgcacaaagaagaattctagatcaagaaacattttttagtagaggtctaagtagaccgttaatgaaaaacacatatctatttgataattacgcgtatggatggataccagaaactgcaatttggagtagtagatacgcaaacttagatgcaagtgactattatcccatttcgttgggattacttaaaaagttcgagtttctcatgtctctatataaaggtcctattccagtatacgaagaaaaagtaaatactgaattcattgctaatggatctttctccggtagatacgtatcatatcttagaaagttttctgctcttccaacaaacgagtttattagttttttgttactgacttccattccaatctataatatcttgttctggtttaaaaatactcagtttgatattactaaacacacattattcagatacgtctatacagataatgccaaacacctggcgttggctaggtatatgtatcaaacaggagactataagcctttgtttagtcgtctcaaagagaattatatatttaccggtcccgttccaatatgtatcaaagatatagatcaccctaatcttagtagagcaagaagtccatccgattatgagacattagctaatattagtactatattgtactttaccaagtatgatccggtattaatgtttttattgttttacgtacctgggtattcaattactacaaaaattactccagccgtagaatatctaatggataaactgaatctaacaaagagcgacgtacaactgttgtaaattattttatgcttcgtaaaatgtaggttttgaaccaaacattctttcaaagaatgagatgcataaaactttattatccaatagattgactatttcggacgtcaatcgtttaaagtaaacttcgtaaaatattctttgatcactgccgagtttaaaacttctatcgataattgtttcatatgttttaatatttacaagttttttggtccatggtccattaggacaaatatatgcaaaataatatcgttctccaagttctatagtctctggattatttttattatattcagtaaccaaatacatattagggttatctgcggatttataatttgagtgatgcattcgactcaacataaataattctagaggagacgatctactatcaaattcggatcgtaaatctgtttctaaagaacggagaatatctatacatacctgattagaattcatccgtccttcagacaacatctcagacagtctggttttgtacatcttaatcatattcttatgaaacttggaaacatctcttctagtttcactagtacctttattaattctctcaggtacagattttgaattcgacgatgctgagtatttcatcgttgtatatttcttcttcgattgcataatcagattcttatataccgcctcaaactctattttaaaattattaaacaatactctattattaatcagtcgttctaactctttcgctatttctatagacttatctacatcttgactgtctatctctgtaaacacggagtcggtatctccatacacgctacgaaaacgaaatctgtaatctataggcaacgatgttttcacaatcggattaatatctctatcgtccatataaaatggattacttaatggattggcaaaccgtaacataccgttagataactctgctccatttagtaccgattctagatacaagatcattctacgtcctatggatgtgcaactcttagccgaagcgtatgagtatagagcactatttctaaatcccatcagaccatatactgagttggctactatcttgtacgtatattgcatggaatcatagatggccttttcagttgaactggtagcctgttttagcatctttttatatctggctctctctgccaaaaatgttcttaatagtctaggaatggttccttctatcgatctatcgaaaattgctatttcagagatgaggttcggtagtctaggttcacaatgaaccgtaatatatctaggaggtggatatttctgaagcaatagctgattatttatttcttcttccaatctattggtactaacaacgacaccgactaatgtttccggagatagatttccaaagatacacacattaggatacagactgttataatcaaagattaatacattattactaaacattttttgttttggagcaaataccttaccgccttcataaggaaacttttgttttgtttctgatctaactaagatagttttagtttccaacaatagctttaacagtggacccttgatgactgtactcgctctatattcgaataccatggattgaggaagcacatatgttgacgcacccgcgtctgtttttgtttctactccataatactcccacaaatactgacacaaacaagcatcatgaatacagtatctagccatatctaaagctatgtttagattataatccttatacatctgagctaaatcaacgtcatcctttccgaaagataatttatatgtatcattaggtaaagtaggacataatagtacgactttaaatccattttcccaaatatctttacgaattactttacatataatatcctcatcaacagtcacataattacctgtggttaaaacctttgcaaatgcagcggctttgcctttcgcgtctgtagtatcgtcaccgatgaacgtcatttctctaactcctctatttaatactttacccatgcaactgaacgcgttcttggatatagaatccaatttgtacgaatccaatttttcaaatttttgaatgaatgaatatagatcgaaaaatatagttccattattgttattaacgtgaaacgtagtattggccatgccgcctactcccttatgactagactgatttctctcataaatacagagatgtacagcttcctttttgtccggagatctaaagataattttctctcctgttaataactctagacgattagtaatatatctcagatcaaagttatgtccgttaaaggtaacgacgtagtcgaacgttagttccaacaattgtttagctattcgtaacaaaactatttcagaacatagaactagttctcgttcgtaatccatttccattagtgactgtatcctcaaacatcctctatcgacggcttcttgtatttcctgttccgttaacatctcttcattaatgagcgtaaacaataatcgtttaccacttaaatcgatataacagtaacttgtatgcgagattgggttaataaatacagaaggaaacttcttatcgaagtgacactctatatctagaaataagtacgatcttgggatatcgaatctaggtatttttttagcgaaacagttacgtggatcgtcacaatgataacatccattgttaatctttgtcaaatattgctcgtccaacgagtaacatccgtctggagatatcccgttagaaatataaaaccaactaatattgagaaattcatccatggtggcattttgtatgctgcgtttctttggctcttctatcaaccacatatctgcgacggagcattttctatctttaatatctagattataacttattgtctcgtcaatgtctatagttctcatctttcccaacggcctcgcattaaatggaggaggagacaatgactgatatatttcgtccgtcactacgtaataaaagtaatgaggaaatcgtataaatacggtctcaccatttcgacatctggatttcagatataaaaatctgttttcaccgtgactttcaaaccaattaatgcaccgaacatccatttatagaatttagaaatatattttcatttaaatgaatcccaaacattggggaagagccgtatggaccattatttttatagtactttcgcaagcgggtttagacggcaacatagaagcgtgtaaacgaaaactatatactatagttagcactcttccatgtcctgcatgtagacggcacgcgactatcgctatagaggacaataatgtcatgtctagcgatgatctgaattatatttattattttttcatcagattatttaacaatttggcatctgatcccaaatacgcgatcgatgtgacaaaggttaaccctttataaacttaacccattataaaacttatgattagtcacaactgaaataaccgcgtgattattttttggtataattctacacggcatggtttctgtgactatgaattcaacccccgttacattagtgaaatctttaacaaacagcaagggttcgtcaaagacataaaactcattgtttacaatcgaaatagaccccctatcacacttaaaataaaaaatatccttatcctttaccaccaaataaaattctgattggtcaatgtgaatgtattcacttaacagttccacaaatttatttattaactccgaggcacatacatcgtcggtattttttatggcaaactttactcttccagcatccgtttctaaaaaaatattaacgagttccatttatatcatccaatattattgaaatgacgttgatggacagatgatacaaataagaaggtacggtacctttgtccaccatctcctccaattcatgctctattttgtcattaactttaatgtatgaaaacagtacgccacatgcttccatgacagtgtgtaacactttggatacaaaatgtttgacattagtataattgttcaagactgtcaatctataatagatagtagctataatatattctatgatggtattgaagaagatgacaaccttggcatattgatcatttaacacagacatggtatcaacagatagcttgaatgaaagagaatcagtaattggaataagcgtcttctcgatagagtgtccgtataccaacatgtctgatattttgatgtattccattaaattatttagttttttctttttattctcgttaaacagcatttctgtcaacggaccccaacatcgttgaccgattaagttttgattgatttttccgtgtaaggcgtatctagtcagatcgtatagcctatccaataatccatcatctgtgcgtagatcacatcgtacactttttaattctctatagaagagcgacagacatctggagcaattacagacagcaatttctttattctctacagatgtaagatacttgaagacattcctatgatgatgcagaattttggataacacggtattgatggtatctgttaccataattcctttgatggctgatagtgtcagagcacaagatttccaatctttgacaatttttagcaccattatctttgttttgatatctatatcagacagcatggtgcgtctgacaacacagggattaagacggaaagatgaaatgattctctcaacatcttcaatagataccttgctattttttctggcattatctatatgtgcgagaatatcctctagagaatcagtatcctttttgatgatagtggatctcaatgacatgggacgtttaaaccttcttattctatcaccagattgcatggtgatttgtcttctttcttttatcataatgtaatctctaaattcatcggcaaattgtctatatctaaaatcataatatgagatgtttacctctacaaatatctgttcgtccaatgttagagtatttacatcagttttgtattccaaattaaacatggcaacggatttaattttatattcctctattaagtcctcgtcgataataacagaatgtagataatcatttaatccatcgtacatggttggaagatgcttgttgacaaaatctttaattgtcttgatgaaggtgggactatatctaacatcttgattaataaaatttataacattgtccataggatactttgtaactagttttatacacatctcttcatcggtaagtttagacagaatatcgtgaacaggtggtatattatattcatcagatatacgaagaacaatgtccaaatctatattgtttaatatattatatagatgtagcgtagctcctacaggaatatctttaactaagtcaatgatttcatcaaccgttagatctattttaaagttaatcatataggcattgatttttaaaaggtatgtagccttgactacattctcattaattaaccattccaagtcactgtgtgtaagaagattatattctatcataagcttgactacatttggtcccgataccattaaagaattcttatgatataaggaaacagcttttaggtactcatctactctacaagaattttggagagccttaacgatatcagtgacgtttattatttcaggaggaaaaaacctaacattgagaatatcggaattaatagcttccagatacagtgattttggcaatagtccgtgtaatccataatccagtaacacgagctggtgcttgctagacaccttttcaatgtttaatttttttgaaataagctttgataaagccttcctcgcaaattccggatacatgaacatgtcggcgacatgattaagtattgttttttcattattttctcaataccccaatagatgatagaatatcacccaatgcgtccatgttgtctatttccaacaggtcgctatatccaccaatagaagtttttccaaaaaagattctaggaacagttctaccaccagtaatttgttcaaaatagtcacgcaattcattttcgggtttaaattctttaatatcgacaatttcatacgctcctcttttgaaactaaacttatttagaatatccagtgcatttctacaaaaaggacatgtatacttgacaaaaattgtcactttgttattggccaacctttgttgtacaaattcctcggccattttaatatttaagtgatataaaactatctcgacttatttaactctttagtcgagatatatggacgcagatagctatatgatagccaactacagaaggcaaacgctataaaaaacataattacgacgagcatatttataaatatttttattcagcattacttgatatagtaatattaggcacagtcaaacattcaaccactctcgatacattaactctctcattttctttaacaaattctgcaatatcttcgtaaaaagattcttgaaactttttagaatatctatcgactctagatgaaatagcgttcgtcaacatactatgttttgtatacataaaggcgcccattttaacagtttctagtgacaaaatgctagcgatcctaggatcctttagaatcacatagattgacgattcgtctctcttagtaactctagtaaaataatcatacaatctagtacgcgaaataatattatccttgacttgaggagatctaaacaatctagttttgagaacatcgataagttcatcgggaatgacatacatactatctttaatagaactcttttcatccagttgaatggattcgtccttaaccaactgattaatgagatcttctattttatcattttccagatgatatgtatgtccattaaagttaaattgtgtagcgcttctttttagtctagcagccaatactttaacatcactaatatcgatatacaaaggagatgatttatctatggtattaagaattcgtttttcgacatccgtcaaaaccaattcctttttgcctgtatcatccagttttccatcctttgtaaagaaattattttctactagactattaataagactgataaggattcctccataattgcacaatccaaactttttcacaaaactagactttacaagatctacaggaatgcgtacttcaggttttttagcttgtgattttttcttttgcggacattttctagtaaccaactcatctaccatttcattgattttagcagtgaaataagctttcaatgcacgggcactgatactattgaaaacgagttgatcttcaaattccgccatttaagttcaccaaacaacttttaaatacaaatatatcaatagtagtagaataagaactataaaaaaaataataattaaccaataccaaccccaacaaccggtattattagttgatgtgactgttttctcatcacttagaacagatttaacaatttctataaagtctgtcaaatcatcttccggagaccccataaatacaccaaatatagcggcgtacaacttatccatttatacattgaatattggcttttctttatcgctatcttcatcatattcatcatcaatatcaacaagtcccagattacgagccagatcttcttctacattttcagtcattgatacacgttcactatctccagagagtccgataacgttagccaccacttctctatcaatgattagtttcttgagcgcgaaagtaatttttgtttccgttccggatctatagaagacgataggtgtgataattgccttagccaattgtctttctcttttactgagtgattctagttcaccttctatagatctgagaatggatgattctccagtcgaaacatattctaccatggatccgtttaatttgttgatgaagatggattcatccttaaatgttttctctgtaatagtttccaccgaaagactatgcaaagaatttggaatgcgttccttgtgcttaatgtttccatagacggcttctagaagttgatacaacataggactagccgcggtaacttttatttttagaaagtatccatcgcttctatcttgtttagatttatttttataaagtttagtctctccttccaacataataaaagtggaagtcatttgactagataaactatcagtaagttttatagagatagacgaacaattagcgtattgagaagcatttagtgtaacgtattcgatacattttgcattagatttactaatcgattttgcatactctataacacccgcacaagtctgtagagaatcgctagatgcagtaggtcttggtgaagtttcaactctcttcttgattaccttactcatgattaaacctaaataattgtactttgtaatataatgatatatattttcactttatctcatttgagaataaaaatgtttttgtttaaccactgcatgatgtacagatttcggaatcgcaaaccaccagtggttttattttatccttgtccaatgtgaattgaatgggagcggatgcgggtttcgtacgtagatagtacattcccgtttttagaccgagactccatccgtaaaaatgcatactcgttagtttggaataactcggatctgctatatggatattcatagattgactttgatcgatgaaggctcccctgtctgcagccatttttatgatcgtcttttgtggaatttcccaaatagttttataaactcgcttaatatcttctggaaggtttgtattctgaatggatccaccatctgccataatcctattcttgatctcatcattccataattttctctcggttaaaactctaaggagatgcggattaactacttgaaattctccagacaatactctccgagtgtaaatattactggtatacggttccaccgactcattatttcccaaaatttgagcagttgatgcagtcggcataggtgccaccaataaactatttctaagaccgtatgttctgattttatcttttagaggttcccaattccaaagatccgacggtacaacattccaaagatcatattgtagaataccgttactggcgtacgatcctacatatgtatcgtatggtccttccttctcagctagttcacaactcgcctctaatgcaccgtaataaatggtttcgaagatcttcttatttagatcttgtgcttccaggctatcaaatggataatttaagagaataaacgcgtccgctaatccttgaacaccaataccgataggtctatgtctcttattagagatttcagcttctggaataggataataattaatatctataattttattgagatttctgacaattactttgaccacatccttcagtttgagaaaatcaaatcgcccatctattacaaacatgttcaaggcaacagatgccagattacaaacggctacctcattagcatccgcatattgtattatctcagtgcaaagattactacacttgatagttcctaaattttgttgattactctttttgttacacgcatccttataaagaatgaatggagtaccagtttcaatctgagattctataatcgctttccagacgactcgagcctttattatagatttgtatctcctttctctttcgtatagtgtatacaatcgttcgaactcgtctccccaaacattgtccaatccaggacattcatccggacacatcaacgaccactctccgtcatccttcactcgtttcataaagagatcaggaatccaaagagctataaatagatctctggttctatgttcctcgtttcctgtattctttttaagatcgaggaacgccataatatcagaatgccacggttccaagtatatggccataactccaggccgtttgtttcctccctgatctatgtatctagcggtgttattataaactctcaacattggaataataccgtttgatataccattggtaccggagatatagcttccactggcacgaatattactaattgatagacctattccccctgccattttagagattaatgcgcatcgttttaacgtgtcatagataccctctatgctatcatcgatcatgttaagtagaaaacagctagacatttggtgacgactagttcccgcattaaataaggtaggagaagcgtgcgtaaaccatttttcagaaagtagattgtacgtctcaatagctgagtctatatcccattgatgaattcctactgcgacacgcattaacatgtgctgaggtctttcaacgatcttgttgtttattttcaacaagtaggatttttccaaagttttaaaaccaaaatagttgtatgaaaagtctcgttcgtaaataataaccgagttgagtttatccttatatttgttaactatatccatggtgatacttgaaataatcggagaatgtttcccatttttaggattaacatagttgaataaatcctccatcacttcactaaatagtttttttgtttccttgtgtagatttgatacggctattctggcggctagaatggcataatccggatgttgtgtagtacaagtggctgctatttcggctgccagagtgtccaattctaccgttgttactccattatatattccttgaataaccttcatagctattttaataggatctatatgatccgtgtttaagccataacataattttctaatacgagacgtgattttatcaaacatgacattttccttgtatccatttcgtttaatgacaaacatttttgttggtgtaataaaaaaattatttaacttttcattaatagggatttgacgtatgtagcgtacaaaatgatcgttcctggtatatagataaagagtcctatatatttgaaaatcgttacggctcgattaaactttaatgattgcatagtgaatatatcattaggatttaactccttgactatcatggcggcgccagaaattaccatcaaaagcattaatacagttatgccgatcgcagttaaaacggttatagcatccaccatttatatctaaaaattagatcaaagaatatgtgacaaagtcctagttgtatactgagaattgacgaaacaatgtttcttacatatttttttcttattagtaactgacttaatagtaggaactggaaagctagacttgattattctataagtatagatacccttccagataatgttctctttgataaaagttccagaaaatgtagaattttttaaaaagttatcttttgctattaccaagattgtgtttagacgcttattattaatatgagtgatgaaatccacaccgcctctagatatcgcctttatttccacattagatggtaaatccaatagtgaaactatctttttaggaatgtatggactcgcgtttagaggagtgaacgtcttgggcgtcggaaaggatgattcgtcaaacgaataaacaatttcacaaatggatgttaatgtattagtaggaaattttttgacgctagtggaattgaagattctaatggatgatgttctacctatttcatccgataacatgttaatttccgacaccaacggttttaatatttcgatgatatacggtagtctctctttcggacttatatagcttattccacaatacgagtcattatatactccaaaaaacaaaataactagtataaaatctgtatcgaatgggaaaaacgaaattatcgacataggtatagaatccggaacattgaacgtattaatacttaattctttttctgtggtaagtaccgataggttattgacattgtatggttttaaatattctataacttgagacttgatagatattagtgatgaattgaaaattatttttatcaccacgtgtgtttcaggatcatcgtcgacgcccgtcaaccaaccgaatggagtaaaataaatatcattaatatatgctctagatattagtatttttattaatcctttgattatcatcttctcgtaggcgaatgattccatgatcaagagtgatttgagaacatcctccggagtattaatgggcttagtaaacagtccatcgttgcaataataaaagttatccaagttaaaggatattatgcattcgtttaaagatatcacctcatctgacggagacaattttttggtaggttttagagactttgaagctacttgtttaacaaagttattcatcgtcgtctactattctatttaattttgtagttaatttatcacatatcacattaattgactttttggtccatttttccatacgtttatattcttttaatcctgcgttatccgtttccgttatatccagggatagatcttgcaagttaaatagaatgctcttaaataatgtcattttcttatccgctaaaaatttaaagaatgtataaacctttttcagagatttgaaactcttaggtggtgtcctagtacacaatatcataaacaaactaataaacattccacattcagattccaacagctgattaacttccacattaatacagcctattttcgctccaaatgtacattcgaaaaatctgaataaaacatcgatgtcacaatttgtattatccaatacagaatgtttgtgattcgtgttaaaaccatcggagaaggaatagaaataaaaattattatagtggtggaattcagttggaatattgcctccggagtcataaaaggatactaaacattgttttttatcataaattacacatttccaatgagacaaataacaaaatccaaacattacaaatctagaggtagaacttttaattttgtctttaagtatatacgataagatatgtttattcataaacgcgtcaaatttttcatgaatcgctaaggagtttaagaatctcatgtcaaattgtcctatataatccacttcggatccataagcaaactgagagactaagttcttaatacttcgattgctcatccaggctcctctctcaggctctattttcatcttgacgacctttggattttcaccagtatgtattcctttacgtgataaatcatcgattttcaaatccatttgtgagaagtctatcgccttagatactttttcccgtagtcgaggtttaaaaaaatacgctaacggtatactagtaggtaactcaaagacatcatatatagaatggtaacgcgtctttaactcgtcggttaactctttcttttgatcgagttcgtcgctactattgggtctgctcaggtgccccgactctactagttccaacatcataccgataggaatacaagacactttgccggcggttgtagatttatcatatttttccactacatatccgttacaatttgttaaaaatttagatacatctatattgctacataatccagctagtgaatatatatgacataataaattggtaaatcctagttctggtattttactaattactaaatctgtatatctttccatttatcatggaaaagaatttaccagatatcttcttttttccaaactgcgttaatgtattctcttacaaatattcacaagatgaattcagtaatatgagtaaaacggaacgtgatagtttctcattggccgtgtttccagttataaaacatagatggcataacgcacacgttgtaaaacataaaggaatatacaaagttagtacagaagcacgtggaaaaaaagtatctcctccatcactaggaaaacccgcacacataaacctaaccgcgaagcaatatatatacagtgaacacacaataagctttgaatgttatagttttctaaaatgtataacaaatacagaaatcaattcgttcgatgagtatatattaagaggactattagaagctggtaatagtttacagatattttccaattccgtaggtaaacgaacagatactataggtgtactagggaataagtatccatttagcaaaattccattggcctcattaactcctaaagcacaacgagagatattttcagcgtggatttctcatagacctgtagttttaactggaggaaccggagtgggtaagacgtcacaggtacccaagttattgctttggtttaattatttatttggtggattctctactctagataaaattactgactttcacgaaagaccagtcattctatctcttcctaggatagctttagttagattgcatagcaataccattttaaaatcattgggatttaaggtactagatggatctcctatttctttacggtacggatctataccggaagaattaataaacaaacaaccaaaaaaatatggaattgtattttctacccataagttatctctaacaaaactatttagttatggcactcttattatagacgaagttcatgagcatgatcaaataggagatattattatagcagtagcgagaaagcatcatacgaaaatagattctatgtttttaatgactgccacattagaggatgaccgagaacggctaaaagtatttttacctaatcccgcatttatacatattcctggagatacactgtttaaaattagcgaggtatttattcataataagataaatccatcttccagaatggcatacatagaagaagaaaagagaaatttagttactgctatacagatgtatactcctcctgatggatcatccggtatagtctttgtggcatccgttgcacagtgtcacgaatataaatcatatttagaaaaaagattaccgtatgatatgtatattattcatggtaaggtcttagatatagacgaaatattagaaaaagtgtattcatcacctaatgtatcgataattatttctactccttatttggaatccagcgttactatacgcaatgttacacacatttatgatatgggtagagtttttgtccccgctccttttggaggatcgcaacaatttatttctaaatctatgagagatcaacgaaaaggaagagtaggaagagttaatcctggtacatacgtctatttctatgatctgtcttatatgaagtctatacagcgaatagattcagaatttctacataattatatattgtacgctaataagtttaatctaacactccccgaagatttgtttataatccctacaaatttggatattctatggcgtacaaaggaatatatagactcgttcgatattagtacagaaacatggaataaattattatccaattattatatgaagatgatagagtatgctaaactttatgtactaagtcctattctcgctgaggagttggataactttgagaggacgggagaattaactagtattgtacgagaagccattttatctctaaatttacgaattaagattttaaattttaaacataaagatgatgatacgtatatacacttttgtaaaatattattcggtgtctataacggaacaaacgctactatatattatcatagacctctaacgggatatatgaatatgatttcagatactatatttgttcctgtagataataactaaaaatcaaactctaatgaccacatctttttttagagatgaaaaattttccacatctccttttgtagacacgactaaacattttgcagaaaaaagtttattagtgtttagataatcgtatacttcatcagtgtagatagtaaatgtgaacagataaaaggtattcttgctcaatagattggtaaattccatagaatatattaatcctttcttcttgagatcccacatcatttcaaccagagacgttttatccaatgatttacctcgtactataccacatacaaaactagattttgcagtgacgtcgtacctggtattcctaccaaacaaaattttacttttagttcttttagaaaattctaaggtagaatctctatttgccaatatgtcatctatggaattaccactagcaaaaaatgatagaaatatatattgatacatcgcagctggttttgatctactatactttaaaaacgaatcagattccataattgcctgtatatcatcagctgaaaaactatgttttacacgtattccttcggcatttctttttaatgatatatcttgtttagacaatgataaagttatcatgtccatgagagacgcgtctccgtatcgtataaatatttcattagatgttagacgcttcattaggggtatacttctataaggtttcttaatcagtccatcattggttgcgtcaagaactactatcggatgttgttgggtatctctagtgttacacatggccttactaaagtttgggtaaataactatgatatctctattaattatagatgcatatatttcattcgtcaaggatattagtatcgacttgctatcgtcattaatacgtgtaatgtaatcatataaatcatgcgatagccaaggaaaatttaaatagatgttcatcatataatcgtcgctataattcatattaatacgttgacattgactaatttgtaatatagcctcgccacgaagaaagctctcgtattcagtttcatcgataaaggataccgttaaatataactggttgccgatagtctcatagtctattaagtggtaagtttcgtacaaatacagaatccctaaaatattatctaatgttggattaatctttaccataactgtataaaatggagacggagtcataactattttaccgtttgtacttactggaatagatgaaggaataatctccggacatgctggtaaagacccaaatgtctgtttgaagaaatccaatgttccaggtcctaatctcttaacaaaaattacgatattcgatcccgatatcctttgcattctatttaccagcatatcacgaactatattaagattatctatcatgtctattctcccaccgttatataaatcgcctccgctaagaaacgttagtatatccatacaatggaatacttcatttctaaaatagtattcgttttctaattctttaatgtgaaatcgtatactagaaagggaaaaattatctttgagttttccgttagaaaagaaccacgaaactaatgttctgattgcgtccgattccgttgctgaattaatggatttacaccaaaaactcatataacttctagatgtagaagcattcgctaaaaaattagtagaatcaaaggatataagtagatgttccaacaagtgagcaattcccaagatttcatctatatcattctcgaatccgaaattagaaattcccaagtagatatcctttttcatccgatcgttgatgaaaatacgaactttattcggtaagacaatcatttactaaggagtaaaataggaagtaatgttcgtatgtcgttatcatcgtataaattaaaggtgtgttttttaccattaagtgacattataattttaccaatattggaattataatataggtgtatttgcgcactcgcgacggttgatgcatcggtaaatatagctgtatctaatgttctagtcggtatttcatcatttcgctgtctaataatagcgttttctctatctgtttccattacagctgcctgaagtttattggtcggataatatgtaaaataataagaaatacatacgaataacaaaaataaaataagatataataaagatgccatttagagatctaattttgtttaacttgtccaaattcctacttacagaagatgaggaatcgttggagatagtgtcttccttatgtagaggatttgaaatatcttataatgacttgataacttactttccagataggaaataccataaatatatttataaagtatttgaacatgtagatttatcggaggaattaagtatggaattccatgatacaactctgagagatttagtctatcttagattgtacaagtattccaagtgtatacggccgtgttataaattaggagataatctaaaaggcatagttgttataaaggacaggaatatttatattagggaagcaaatgatgacttgatagaatatctcctcaaggaatacactcctcagatttatacatattctaatgagcgcgtccccataactggttcaaaattaattctttgtggattttctcaagttacatttatggcgtatacaacgtcgcatataacaacaaataaaaaggtagatgttctcgtttccaaaaaatgtatagatgaactagtcgatccaataaattatcaaatacttcaaaatttatttgataaaggaagcggaacaataaacaaaatactcaggaagatattttattcggtaacaggtggccaaactccataggtagctttttctatttcggattttagaatttccaaattcaccagcgatttatcggttttggtgaaatccaaggatttattaatgtccacaaatgccatttgttttgtctgtggattgtatttgaaaatggaaacgatgtagttagatagatgcgctgcaaagtttcctattagggttccgcgctttacgtcacccagcatacttgaatcaccatcctttaaaaaaaatgataagatatcaacatggagtatatcatactcggattttaattcttctactgcatcactgacattttcacaaatactacaatacggtttaccgaaaataatcagtacgttcttcatttatgggtatcaaaaacttaaaatcgttactgctggaaaataaatcactgacgatattagatgataatttatacaaagtatacaatggaatatttgtggatacaatgagtatttatatagccgtcgccaattgtgtcagaaacttagaagagttaactacggtattcataaaatacgtaaacggatgggtaaaaaagggagggcatgtaaccctttttatcgatagaggaagtataaaaattaaacaagacgttagagacaagagacgtaaatattctaaattaaccaaggacagaaaaatgttagaattagaaaagtgtacatccgaaatacaaaatgttaccggatttatggaagaagaaataaaggcagaaatgcaattaaaaatcgataaactcacatttcaaatatatttatctgattctgataacataaaaatatcattgaatgagatactaacacatttcaacaataatgagaatgttacattattttattgtgatgaacgagacgcagaattcgttatgtgtctcgaggctaaaacacatttctctaccacaggagaatggccgttgataataagtaccgatcaggatactatgctatttgcatctgctgataatcatcctaagatgataaaaaacttaactcaactgtttaaatttgttccctcggcagaggataactatttagcaaaattaacggcgttagtgaatggatgtgatttctttcctggactctatggggcatctataacacccaccaacttaaacaaaatacaattgtttagtgattttacaatcgataatatagtcactagtttggcaattaaaaattattatagaaagactaactctaccgtagacgtgcgtaatattgttacgtttataaacgattacgctaatttagacgatgtctactcgtatattcctccttgtcaatgcactgttcaagaatttatattttccgcattagatgaaaaatggaatgaatttaaatcatcttatttagaaagcgtgccgttaccctgccaattaatgtacgcgttagaaccacgcaaggagattgatgtttcagaagttaaaactttatcatcttatatagatttcgaaaatactaaatcagatatcgatgttataaaatctatatcctcgatcttcggatattctaacgaaaactgtaacacgatagtattcggcatctataaggataatttactactgagtataaataattcattttactttaacgatagtctgttaataaccaatactaaaagtgataatataataaatataggttactagattaaaaatggtgttccaactcgtgtgctctacatgcggtaaagatatttctcacgaacgatataaattgattatacgaaaaaaatcattaaaggatgtactcgtcagtgtaaagaacgaatgttgtaggttaaaattatctacacaaatagaacctcaacgtaacttaacagtgcaacctctattggatataaactaatatggatccggttaattttatcaagacatatgcgcctagaggttctattatttttattaattataccatgtcattaacaagtcatttgaatccatcgatagaaaaacatgtgggtatttattatggtacgttattatcggaacacttggtagttgaatctacctatagaaaaggagttcgaatagtcccattggatagtttttttgaaggatatcttagtgcaaaagtatacatgttagagaatattcaagttatgaaaatagcagctgatacgtcattaactttattgggtattccgtatggatttggtcataatagaatgtattgttttaaattggtagctgactgttataaaaatgccggtattgatacatcgtctaaacgaatattgggcaaagatatttttctgagccaaaacttcacagacgataatagatggataaagatatatgattctaataatttaacattttggcaaattgattaccttaaagggtgagttaatatgcataactactcctccgttgttttttccctcgttctttttcttaacgttgtttgccatcactctcataatgtaaagatattctaaaatggtaaacttttgcatatcggacgcagaaattggtataaatgttgtaattgtattatttcccgtcaatggactagtcacagctccatcagttttatatcctttagagtatttctcactcgtgtctaacattctagagcattccatgatctgtttatcgttgatattggccggaaagatagattttttattttttattatattactattggcaattgtagatataacttctggtaaatatttttctaccttttcaatctcttctattttcaagccggctatatattctgctatattgttgctagtatcaataccttttctggctaagaagtcatatgtggtattcactatatcagttttaactggtagttccattagcctttccacttctgcagaataatcagaaattggttctttaccagaaaatccagctactataataggctcaccgatgatcattggcaaaatcctatattgtaccagattaatgagagcatatttcatttccaataattctgctagttcttgagacattgatttatttgatgaatctagttggttctctagatactctaccatttctgccgcatacaataacttgttagataaaatcagggttatcaaagtgtttagcgtggctagaatagtgggcttgcatgtattaaagaatgcggtagtatgagtaaaccgttttaacgaattatatagtctccagaaatctgtggcgttacatacatgagccgaatgacatcgaagattgtccaatatttttaatagctgctctttgtccattatttctatatttgactcgcaacaattgtagataccattaatcaccgattcctttttcgatgccggacaatagcacaattgtttagctttggactctatgtattcagaattaatagatatatctctcaatacagattgcactatacattttgaaactatgtcaaaaattgtagaacgacgctgttctgcagccatttaactttaaataatttacaaaaatttaaaatgagcatccgtataaaaatcgataaactgcgccaaattgtggcatatttttcagagttcagtgaagaagtgtctataaatgtagactcgacggatgagttaatgtatatttttgccgccttgggcggatctgtaaacatttgggcaattatacctctaagtgcatcagtgttttaccgaggagccgaaaatattgtgtttaatcttcctgtgtccaaggtaaaatcgtgtttgtgtagttttcacaatgatgccatcatagatatagaacctgatctggaaaataatctagtaaaactttctagttatcatgtagtaagtgtcgattgtaacaaggaactgatgcctattaggacagatactactatttgtctaagtatagatcaaaagaaatcttacgtgtttaattttcacaagtatgaagaaaaatgttgtggtagaaccgtcattcatctagaatggttgttgggctttatcaagtgtattagtcagcatcagcatctggctattatgtttaaagatgacaatattattatgaagactcctggtaatactgatgcgttttccagggaatattctatgactgaatgttctcaagaactacaaaagttttctttcaaaatagctatctcgtctctcaacaaactacgaggattcaaaaagagagtcaatgtttttgaaactagaatcgtaatggataatgacgataacattttaggaatgttgttttcggatagagttcaatcctttaagatcaacatctttatggcgtttttagattaatactttcaatgagataaatatgggtggcggagtaagtgttgagctccctaaacgggatccgcctccgggagtacccactgatgagatgttattaaacgtggataaaatgcatgacgtgatagctcccgctaagcttttagaatatgtgcatataggaccactagcaaaagataaagaggataaagtaaagaaaagatatccagagtttagattagtcaacacaggacccggtggtctttcggcattgttaagacaatcgtataatggaaccgcacccaattgctgtcgcacttttaatcgtactcattattggaagaaggatggaaagatatcagataagtatgaagagggtgcagtattagaatcgtgttggccagacgttcacgacactggaaaatgcgatgttgatttattcgactggtgtcagggggatacgttcgatagaaacatatgccatcagtggatcggttcagcctttaataggagtaatagaactgtagagggtcaacaatcgttaataaatctgtataataagatgcaaacattatgtagtaaagatgctagtgtaccaatatgcgaatcatttttgcattatttacgcgcacacaatacagaagatagcaaagagatgatcgattatattctaagacaacagtctgcggactttaaacagaaatatatgagatgtagttatcccactagagataagttagaagagtcattaaaatatgcggaacctcgagaatgttgggatccagagtgttcgaatgccaatgttaatttcttactaacacgtaattataataatttaggactttgcaatattgtacgatgtaataccagcgtgaacaacttacagatggataaaacttcctcattaagattgtcatgtggattaagcaatagtgatagattttctactgttcccgtcaatagagcaaaagtagttcaacataatattaaacactcgttcgacctaaaattgcatttgatcagtttattatctctcttggtaatatggatactaattgtagctatttaaatgggtgccgcggcaagcatacagacgacggtgaatacactcagcgaacgtatctcgtctaaattagaacaagaagcgaacgctagtgctcaaacaaaatgtgatatagaaatcggaaatttttatatccgacaaaaccatggatgtaacctcactgttaaaaatatgtgctctgcggacgcggatgctcagttggatgctgtgttatcagccgctacagaaacatatagtggattaacaccggaacaaaaagcatacgtgccagctatgtttactgctgcgttaaacattcagacgagtgtaaacactgttgttagagattttgaaaattatgtgaaacagacttgtaattctagcgcggtcgtcgataacaaattaaagatacaaaacgtaatcatagatgaatgttacggagccccaggatctccaacaaatttggaatttattaatacaggatctagcaaaggaaattgtgccattaaagcgttgatgcaattgacgactaaggccactactcaaatagcacctagacaagttgctggtacaggagttcagttttatatgattgttatcggtgttataatattggcagcgttgtttatgtactatgccaagcgtatgttgttcacatccaccaatgataaaatcaaacttattttagccaataaggaaaacgtccattggactacttacatggacacattctttagaacttctccgatggttattgctaccacggatatgcaaaactgaaaatatattgataatattttaatagattaacatggaagttatcgctgatcgtctagacgatatagtgaaacaaaatatagcggatgaaaaatttgtagattttgttatacacggtctagagcatcaatgtcctgctatacttcgaccattaattaggttgtttattgatatactattatttgttatagtaatttatatttttacggtacgtctagtaagtagaaattatcaaatgttgttggtggtgctagtcatcacattaactattttttattactttatactataatagtactagactgacttctaacaaacatctcacctgccataaataaatgcttgatattaaagtcttctatttctaacactattccatctgtggaaaataatactctgacattatcgctaattgacacatcggtgagtgatatgcctataaagtaataatcttctttgggcacatataccagtgtaccaggttctaacaacctatttactggtgctcctgtagcatactttttctttaccttgagaatatccatcgtttgcttggtcaatagcgatatgtgattttttatcaaccactcaaaaaagtaattggagtgttcatatcctctacgggctattgtctcatggccgtgtatgaaatttaagtaacacgactgtggtagatttgttctatagagccgattgccgcaaatagatagaactaccaatatgtctgtacaaatgttaaacattaattgattaacagaaaaaacaatgttcgttctgggaatagaaaccagatcaaaacaaaattcgttagaatatatgccacgtttatacatggaatataaaataactacagtttgaaaaataacagtatcatttaaacatttaacttgcggggttaatctcacaactttactgtttttgaactgttcaaaatatagcatcgatccgtgagaaatacgtttagccgcctttaatagaggaaatcccaccgcctttctggatctcaccaacgacgatagttctgaccagcaactcatttcttcatcatccacctgttttaacatataataggcaggagatagatatccgtcattgcaatattccttctcgtaggcacacaatctaatattgataaaatctccattctcttctctgcatttattatcttgtctcggtggctgattaggctgtggtcttggtttaggccttggtctatcgttgttgaatctattttggtcattaaatctttcatttcttcctggtatatttttatcacctcgtttggttggatttttgtctatattatcgtttgtaacatcggtacgggtattcatttatcacaaaaaaaacttctctaaatgagtctactgctagaaaacctcatcgaagaagataccatattttttgcaggaagtatatctgagtatgatgatttacaaatggttattgccggcgcaaaatccaaatttccaagatctatgctttctatttttaatatagtacctagaacgatgtcaaaatatgagttggagttgattcataacgaaaatatcacaggagcaatgtttaccacaatgtataatataagaaacaatttgggtctaggagatgataaactaactattgaagccattgaaaactatttcttggatcctaacaatgaagttatgcctcttattattaataatacggatatgactgccgtcattcctaaaaaaagtggtaggagaaagaataagaacatggttatcttccgtcaaggatcatcacctatcttgtgcattttcgaaactcgtaaaaagattaatatttataaagaaaatatggaatccgcgtcgactgagtatacacctatcggagacaacaaggctttgatatctaaatatgcgggaattaatgtcctgaatgtgtattctccttccacatccataagattgaatgccatttacggattcaccaataaaaataaactagagaaacttagtactaataaggaactagaatcgtatagttctagccctcttcaagaacccattaggttaaatgattttctgggactattggaatgtgttaaaaagaatattcctctaacagatattccgacaaaggattgattactataaatggagaatgttcctaatgtatactttaatcctgtgtttatagagcccacgtttaaacattctttattaagtgtttataaacacagattaatagttttatttgaagtattcgttgtattcattctaatatatgtattttttagatctgaattaaatatgttcttcatgcctaaacgaaaaatacccgatcctattgatagattacgacgtgctaatctagcgtgtgaagacgataaattaatgatctatggattaccatggatgacaactcaaacatctgcgttatcaataaatagtaaaccgatagtgtataaagattgtgcaaagcttttgcgatcaataaatggatcacaaccagtatctcttaacgatgttcttcgcagatgatgattcattttttaagtatttggctagtcaagatgatgaatcttcattatctgatatattgcaaatcactcaatatctagactttctgttattattattgatccaatcaaaaaataaattagaagctgtgggtcattgttatgaatctctttcagaggaatacagacaattgacaaaattcacagactttcaagattttaaaaaactgtttaacaaggtccctattgttacagatggaagggtcaaacttaataaaggatatttgttcgactttgtgattagtttgatgcgattcaaaaaagaatcctctctagctaccaccgcaatagatcctgttagatacatagatcctcgtcgtgatatcgcattttctaacgtgatggatatattaaagtcgaataaagtgaacaataattaattctttattgtcatcatgaacggcggacatattcagttgataatcggccccatgttttcaggtaaaagtacagaattaattagacgagttagacgttatcaaatagctcaatataaatgcgtgactataaaatattctaacgataatagatacggaacgggactatggacgcatgataagaataattttgaagcattggaagcaactaaactatgtgatgtcttggaatcaattacagatttctccgtgataggtatcgatgaaggacagttctttccagacattgtttaattctgtgagcgtatggcaaacgaaggaaaaatagttatagtagccgcactcgatgggacatttcaacgtaaaccgtttaataatattttgaatcttattccattatctgaaatggtggtaaaactaactgctgtgtgtatgaaatgctttaaggaggcttccttttctaaacgattgggtgaggaaaccgagatagagataataggaggtaatgatatgtatcaatcggtgtgtagaaagtgttacgtcggctcataatattatattttttatctaaaaaactaaaaataaacattgattaaattttaatataatacttaaaaatggatgttgtgtcgttagataaaccgtttatgtattttgaggaaattgataatgagttagattacgaaccagaaagtgcaaatgaggtcgcaaaaaaactgccgtatcaaggacagttaaaactattactaggagaattattttttcttagtaagttacagcgacacggtatattagatggtgccaccgtagtgtatataggatcggctcctggtacacatatacgttatttgagagatcatttctataatttaggagtgatcatcaaatggatgctaattgacggccgccatcatgatcctattttaaatggattgcgtgatgtaactctagtgactcggttcgttgatgaggaatatctacgatccatcaaaaaacaactgcatccttctaagattattttaatttctgatgtgagatccaaacgaggaggaaatgaacctagtacggcggatttactaagtaattacgctctacaaaatgtcatgattagtattttaaaccccgtggcgtctagtcttaaatggagatgcccgtttccagatcaatggatcaaggacttttatatcccacacggtaataaaatgttacaaccttttgctccttcatattcagctgaaatgagattattaagtatttataccggtgagaacatgagactgactcgagttaccaaattagacgctgtaaattatgaaaaaaagatgtactaccttaataagatcgtccgtaacaaagtagttgttaactttgattatcctaatcaggaatatgactattttcacatgtactttatgctgaggaccgtgtactgcaataaaacatttcctactactaaagcaaaggtactatttctacaacaatctatatttcgtttcttaaatattccaacaacatcaactgaaaaagttagtcatgaaccaatacaacgtaaaatatctagcaaaaattctatgtctaaaaacagaaatagcaagagatccgtacgcggtaataaatagaaacgtactactgagatatactaccgatatagagtataatgatttagttactttaataaccgttagacataaaattgattctatgaaaactgtgtttcaggtatttaacgaatcatccataaattatactccggttgatgatgattatggagaaccaatcattataacatcgtatcttcaaaaaggtcataacaagtttcctgtaaattttctatacatagatgtggtaatatctgacttatttcctagctttgttagactagatactacagaaactaatatagttaatagtgtactacaaacaggcgatggtaaaaagactcttcgtcttcccaaaatgttagagacggaaatagttgtcaagattctctatcgccctaatataccattaaaaattgttagatttttccgcaataacatggtaactggagtagagatagccgatagatctgttatttcagtcgctgattaatcaattagtagagatgagataagaacattataataatcaataatatatcttatatcttatatcttatatcttatatcttgtttagaaaaatgctaatattaaaatagctaacgctagtaatccaatcggaagccatttgatatctataatagggtatctaatttcctgatttaaatagcggacagctatattctcggtagctactcgtttggaatcacaaacattatttacatctaatttactatctgtaatggaaacgtttcccaatgaaatggtacaatccgatacattgcattttgttatatttttttttaaagaggctggtaacaacgcatcgcttcgtttacatggctcgtaccaacaataatagggtaatcttgtatctattcctatccgtactatgcttttatcaggataaatacatttacatcgtatatcgtctttgttagcatcacagaatgcataaatttgttcgtccgtcatgataaaaatttaaagtgtaaatataactattatttttatagttgtaataaaaagggaaatttaattgtatactttcggttctttaaaagaaactgacttgataaaaatggctgtaatctctaaggttacgtatagtctatatgatcaaaaagagattaatgctacagatattatcattagtcatgttaaaaatgacgacgatatcggtaccgttaaagatggtagactaggtgctatggatggggcattatgtaagacttgtgggaaaacggaattggaatgtttcggtcactggggtaaagtaagtatttataaaactcatatagttaagcctgaatttatttcagaaattattcgtttactgaatcatatatgtattcactgcggattattgcgttcacgagaaccgtattccgacgatattaacctaaaagagttatcgggacacgctcttaggagattaaaggataaaatattatccaagaaaaagtcatgttggaacagtgaatgtatgcaaccgtatcaaaaaattactttttcaaagaaaaaggtttgtttcgtcaacaagttggatgatattaacgttcctaattctctcatctatcaaaagttaatttctattcatgaaaagttttggccattattagaaattcatcaatatccagctaacttattttatacagactactttcccatccctccgttgattattagaccggctattagtttttggatagatagtatacccaaagagaccaatgaattaacttacttattaggtatgatcgttaagaattgtaacttgaatgctgatgaacaggttatccagaaggcggtaatagaatacgatgatattaaaattatttctaataacactaccagtatcaatttatcatatattacatccggcaaaaataatatgattagaagttatatcgtcgcccgacgaaaagatcagaccgctagatctgtaattggtcccagtacatctatcaccgttaatgaggtaggaatgcccgcatatattagaaatacacttacagaaaagatatttgttaatgcctttacagtggataaagttaaacaactattagcgtcaaaccaagttaaattttactttaataaacgattaaaccaattaacaagaatacgccaaggaaagtttattaaaaataaaatacatttattgcctggtgattgggtagaagtagctgttcaagaatatacaagtattatttttggaagacagccgtctctacatagatacaacgtcatcgcttcatctatcagagctaccgaaggagatactatcaaaatatctcccggaattgccaactctcaaaatgctgatttcgacggggatgaggaatggatgatattagaacaaaatcctaaagctgtaattgaacaaagtattcttatgtatccgacgacgttactcaaacacgatattcatggagcccccgtttatggatctattcaagatgaaatcgtagcagcgtattcattgtttaggatacaagatctttgtttagatgaagtattgaacatcttggggaaatatggaagagagttcgatcctaaaggtaaatgtaaattcagcggtaaagatatctatacttacttgataggtgaaaagattaattatccgggtctcttaaaggatggtgaaattattgcaaacgacgtagatagtaattttgttgtggctatgaggcatctgtcattggctggactcttatccgatcataagtcgaacgtggaaggtatcaactttattatcaagtcatcttatgtttttaagagatatctatctatttacggttttggggtgacattcaaagatctgagaccaaattcgacgttcactaataaattggaggccatcaacgtagaaaaaatagaacttatcaaagaagcatacgccaaatatctcaacgatgtaagagacgggaaaatagttccattatctaaagctttagaggcggactatgtggaatccatgttatccaacttgacaaatcttaatatccgagagatagaagaacatatgagacaaacgctgatagatgatccagataataacctcctgaaaatggccaaagcgggttataaagtaaatcccacagaactaatgtatattctaggtacgtatggacaacaaaggattgatggtgaaccagcagagactcgagtattgggtagagttttaccttactatcttccagactctaaggatccagaaggaagaggttatattcttaattctttaacaaaaggattaacgggttctcaatattacttttcgatgctggttgcaagatctcaatctactgatatcgtctgtgaaacatcacgtaccggaacactggctagaaaaatcattaaaaagatggaggatatggtggtcgacggatacggacaagtagttataggtaatacgctcatcaagtacgccgccaattataccaaaattctaggctcagtatgtaaacctgtagatcttatctatccagatgagtccatgacttggtatttggaaattagtgctctgtggaataaaataaaacagggattcgtttactctcagaaacagaaacttgcaaagaagacattggcgccgtttaatttcctagtattcgtcaaacccaccactgaggataatgctattaaggttaaggatctgtacgatatgattcataacgtcattgatgatgtgagagagaaatacttctttacggtatctaatatagattttatggagtatatattcttgacgcatcttaatccttctagaattagaattacaaaagaaacggctatcactatctttgaaaagttctatgaaaaactcaattatactctaggtggtggaactcctattggaattatttctgcacaggtattgtctgagaagtttacacaacaagccctgtccagttttcacactactgaaaaaagtggtgccgtcaaacaaaaacttggtttcaacgagtttaataacttgactaatttgagtaagaataagaccgaaattatcactctggtatccgatgatatctctaaacttcaatctgttaagattaatttcgaatttgtatgtttgggagaattaaatccagacatcactcttcgaaaagaaacagataggtatgtagtagatataatagtcaatagattatacatcaagagagcagaaataaccgaattagtcgtcgaatatatgattgaacgatttatctcctttagcgtcattgtaaaggaatggggtatggaaacattcattgaggatgaggataatattagatttactgtctacctaaatttcgttgaaccggaagaattgaatcttagtaagtttatgatggttcttccgggtgccgccaacaagggaaagattagtaaattcaagattcctatctctgactatacgggttatgacgacttcaatcaaacaaaaaagctcaataagatgactgtagaactcatgaatctaaaagaattgggttctttcgatttggaaaacgtcaacgtgtatcctggagtatggaatacatacgatatcttcggtatcgaggccgctcgtgaatacttgtgcgaagccatgttaaacacctatggagaagggttcgattatctgtatcagccttgtgatcttctcgctagtttactatgtgctagttacgaaccagaatcagtgaataaattcaagttcggcgcagctagtactcttaagagagctacgttcggagacaataaagcattgttaaacgcggctcttcataaaaagtcagaacctattaacgataatagtagctgccacttttttagcaaggtccctaatataggaactggatattacaaatactttatcgacttgggtcttctcatgagaatggaaaggaaactatctgataagatatcttctcaaaagatcaaggaaatggaagaaacagaagacttttaattcttatcaataacatatttttctatgatctgtcttttaaacgatggattttccacaaatgcgcctctcaagtccctcatagaatgatacacgtataaaaaatatagcataggcaatgactccttatttttagacattagatatgccaaaatcatagccccgcttctatttactcccgcagcacaatgaaccaacacgggctcgtttcgttgatcacatttagataaaaaggcggttacgtcgtcaaaatatttactaatatcggtagttgtatcatctaccaacggtatatgaataatattaatattagagttaggtaatgtatatttatccatcgtcaaatttaaaacatatttgaacttaacttcagatgatggtgcatccatagcatttttataatttcccaaatacacattattggttacccttgtcattatagtgggagatttggctttgtgcatatctccagttgaacgtagtagtaagtatttatacaaacttttcttatccatttataacgtacaaatggataaaactactttatcggtaaacgcgtgtaatttagaatacgttagagaaaaggctatagtaggcgtacaagcagccaaaacatcaacacttatattctttgttattatattggcaattagtgcgctattactctggtttcagacgtctgataatccagtctttaatgaattaacgagatatatgcgaattaaaaatacggttaacgattggaaatcattaacggatagcaaaacaaaattagaaagtgatagaggtagacttctagccgctggtaaggatgatatattcgacttcaaatgtgtggatttcggcgcctattttatagctatgcgattggataagaaaacatatctgccgcaagctattaggcgaggtactggagacgcgtggatggttaaaaaggcggcaaaggtcgatccatctgctcaacaattttgtcagtatttgataaaacacaagtctaataatgttattacttgtggtaatgagatgttaaatgaattaggttatagcggttattttatgtcaccgcattggtgttccgattttagtaatatggaatagtgttagataaatgcggtaacgaatgttcctgtaaggaaccataacagcttagatttaacgttaaagatgagcataaacataataaacaaaattacaatcaaacttataacattaatatcaaacaatccaaaaaatgaaatcagtggagtagtaaacgcgtacataactcctggataacgtttagcagctgccgttcctattctagaccaaaaatttggtttcatgttttcgaaacggtattctgcaacaagtcggggatcgtgttctacatatttggcggcattatccagtatctgcctattgatcttcatttcgttttcgattctggctatttcaaaataaaatcccgatgatagacctccagactttataatttcatctacgatgttcagcgccgtagtaactctaataatataggctgataagctaacatcataccctcctgtatatgtgaatatggcatgatttttgtccattacaagctcggttttaactttattgcctgtaataatttctctcatctgtaggatatctatttttttgtcatgcattgccttcaagacgggacgaagaaacgtaatatcctcaataacgttatcgttttctacaataactacatattctacctttttattttctaactcggtaaaaaaattagaatcccatagggctaaatgtctagcgatatttcttttcgtttcctctgtacacatagtgttacaaaaccctgaaaagaagtgagtatacttgtcatcatttctaatgtttcctccagtccactgtataaacgcataatccttgtaatgatctggatcatccttgactaccacaacatttcttttttctggcataacttcgttgtcctttacatcatcgaacttctgatcattaatatgctcatgaacattaggaaatgtttctgatggaggtctatcaataactggcacaacaataacaggagttttcaccgccgccatttagttattgaaattaatcatatacaactctttaatacgagttatattttcgtctatccattgtttcacatttacatatttcgacaaaaagatataaaatgcgtattccaatgcttctctgtttaatgaattactaaaatatacaaacacgtcactgtctggcaataaatgatatcttagaatattgtaacaatttattttgtattgcacatgttcgtgatctatgagttcttcttcgaatggcataggatctccgaatctgaaaacgtataaataggagttagaataataatatttgagagtattggtaatatataaactctttagcggtataattagtttttttctctcaatttctatttttagatgtgatggaaaaatgactaattttgtagcattagtatcatgaactctaatcaaaatcttaatatcttcgtcacacgttagctctttgaagtttttaagagatgcatcagttggttctacagatggagtaggtgcaacaattttttgttctacacatgtatgtactggagccattgttttaactataatggtgcttgtatcgaaaaactttaatgcagatagcggaagctcttcgccgcgactttctacgtcgtaattgggttctaacgccgatctctgaatggatactagttttctaagttctaatgtgattctctgaaaatgtaaatccaattcctccggcattatagatgtgtatacatcggtaaataaaactatagtatccaacgatcccttctcgcaaattctagtcttaaccaaaaaatcgtatataaccacggagatggcgtatttaagagtggattcttctaccgttttgttcttggatgtcatataggaaactataaagtccgcactactgttaagaatgattactaacgcaactatatagttcaaattaagcattttggaaacataaaataactctgtagacgatacttgactttcgaataagtttgcagacaaacgaagaaagaacagacctctcttaatttcagaagaaaactttttttcgtattcctgacgtctagagtttatatcaataagaaagttaagaattagtcggttaatgttgtatttcattacccaagtttgagatttcataatattatcaaaagacatgataatattaaagataaagcgctgactatgaacgaaatagctatatggttcgctcaagaatatagtcttgttaaacgtggaaacgataactgtatttttaatcacgtcagcggcatctaaattaaatataggtatatttattccacacactctacaatatgccacaccatcttcataataaataaattcgttagcaaaattattaattttagtgaaatagttagcgtcaactttcatagcttccttcaatctaatttgatgctcacacggtgcgaattccactctaacatcccttttccatgcctcaggttcatcgatctctataatatctagttttttgcgtttcacaaacacaggctcgtctctcgcgatgagatctgtatagtaactatgtaaatgataactagatagaaagatgtagctatatagatgacgatcctttaagagaggtataataactttaccccaatcagatagactgttgttatggtcttcggaaaaagaatttttataaatttttccagtattttccaaatatacgtacttaacatctaaaaaatccttaatgataataggaatggataatccgtctattttataaagaaatacatatcgcacattatacttttttttggaaatgggaataccgatgtgtctacataaatatgcaaagtctaaatattttttagagaatcttagttggtccaaattcttttccaagtacggtaatagatttttcatattgaacggtatcttcttaatctctggttctagttccgcattaaatgatgaaactaagtcactatttttataactaacgattacatcacctctaacatcatcatttaccagaatactgatcttcttttgtcgtaaatacatgtctaatgtgttaaaaaaaagatcatacaagttatacgtcatttcatctgtggtattcttgtcattgaaggataaactcgtactaatctcttctttaacagcctgttcaaatttatatcctatatacgaaaaaatagcaaccagtgtttgatcatccgcgtcaatattctgttctatcgtagtgtataacaatcgtatatcttcttctgtgatagtcgatacgttataaaggttgataacgaaaatatttttatttcgtgaaataaagtcatcgtaggattttggacttatattcgcgtctagtagatatgcttttatttttggaatgatctcaattagaatagtctctttagagtccatttaaagttacaaacaactaggaaattggtttatgatgtataatttttttagtttttatagattctttattctatacttaaaaaatgaaaataaatacaaaggttcttgagggttgtgttaaattgaaagcgagaaataatcataaattatttcattatcgcgatatccgttaagtttgtatcgtaatggcgtggtcaattacgaataaagcggatactagtagcttcacaaagatggctgaaatcagagctcatctaaaaaatagcgctgaaaataaagataaaaacgaggatattttcccggaagatgtaataattccatctactaagcccaaaaccaaacgagccactactcctcgtaaaccagcggctactaaaagatcaaccaaaaaggaggaagtggaagaagaagtagttatagaggaatatcatcaaacaactgaaaaaaattctccatctcctggagtcagcgacattgtagaaagcgtggccgctgtagagctcgatgatagcgacggggatgatgaacctatggtacaagttgaagctggtaaagtaaatcatagtgctagaagcgatctctctgacctaaaggtggctaccgacaatatcgttaaagatcttaagaaaattattactagaatctctgcagtatcgacggttctagaggatgttcaagcagctggtatctctagacaatttacttctatgactaaagctattacaacactatctgatctagtcaccgagggaaaatctaaagttgttcgtaaaaaagttaaaacttgtaagaagtaaatgcgtgcacttttttataaagatggtaaactctttaccgataataattttttaaatcctgtatcagacgataatccagcgtatgaggttttgcaacatgttaaaattcctactcatttaacagatgtagtagtatatgaacaaacgtgggaggaggcgttaactagattaatttttgtgggaagcgattcaaaaggacgtagacaatacttttacggaaaaatgcatgtacagaatcgcaacgctaaaagagatcgtatttttgttagagtatataacgttatgaaacgaattaattgttttataaacaaaaatataaagaaatcgtccacagattccaattatcagttggcggtttttatgttaatggaaactatgttttttattagatttggtaaaatgaaatatcttaaggagaatgaaacagtagggttattaacactaaaaaataaacacatagaaataagtcccgatgaaatagttatcaagtttgtaggaaaggacaaagtttcacatgaatttgttgttcataagtctaatagactatataaaccgctattgaaactgacggatgattctagtcccgaagaatttctgttcaacaaactaagtgaacgaaaggtatatgaatgtatcaaacagtttggtattagaatcaaggatctccgaacgtatggagtcaattatacgtttttatataatttttggacaaatgtaaagtccatatctcctcttccatcaccaaaaaagttaatagcattaactatcaaacaaactgctgaagtggtaggtcatactccatcaatttcaaaaagagcttatatggcaacgactattttagaaatggtaaaggataaaaattttttagatgtagtatctaaaactacgttcgatgaattcctatctatagtcgtagatcacgttaaatcatctacggatggatgatatagatctttacacaaataattacaagaccgataaatggaaatggataagcgtatgaaatctctcgcaatgacagctttcttcggagagctaagcacattagatattatggcattgataatgtctatatttaaacgccatccaaacaataccattttttcagtggataaggatggtcagtttatgattgatttcgaatacgataattataaggcttctcaatatttggatctgaccctcactccgatatctggagatgaatgcaagactcacgcatcgagtatagccgaacaattggcgtgtgtggatattattaaagaggatattagcgaatatatcaaaactactccccgtcttaaacgatttataaaaaaataccgcaatagatcagatactcgcatcagtcgagatacagaaaagcttaaaatagctctagctaaaggcatagattacgaatatataaaagacgcttgttaataagtaaatgaaaaaaaactagtcgtttataataaaacacgatatggatgccaacgtagtatcatcttctactattgcgacgtatatagacgctttagcgaagaatgcttcagaattagaacagaggtctaccgcatacgaaataaataatgaattggaactagtatttattaagccgccattgattactttgacaaatgtagtgaatatctctacgattcaggaatcgtttattcgatttaccgttactaataaggaaggtgttaaaattagaactaagattccattatctaaggtacatggtctagatgtaaaaaatgtacagttagtagatgctatagataacatagtttgggaaaagaaatcattagtgacggaaaatcgtcttcacaaagaatgcttgttgagactatcgacagaggaacgtcatatatttttggattacaagaaatatggatcctctatccgactagaattagtcaatcttattcaagcaaaaacaaaaaactttacgatagactttaagctaaaatattttctaggatccggtgcccaatctaaaagttctttgttgcacgctattaatcatccaaagtcaaggcctaatacatctctggaaatagaattcacacctagagacaatgaaacagttccatatgatgaactaataaaggaattgacgactctctcgcgtcatatatttatggcttctccagagaatgtaattctttctccgcctattaacgcgcctataaaaacctttatgttgcctaaacaagatatagtaggtttggatctggaaaatctatatgccgtaactaagactgacggcattcctataactatcagagttacatcaaacgggttgtattgttattttacacatcttggttatattattagatatcctgttaagagaataatagattccgaagtagtagtctttggtgaggcagttaaggataagaactggaccgtatatctcattaagctaatagagcctgtgaatgcaatcaatgatagactagaagaaagtaagtatgttgaatctaaactagtggatatttgtgatcggatagtattcaagtcaaagaaatacgaaggtccgtttactacaactagtgaagtcgtcgatatgttatctacatatttaccaaagcaaccagaaggtgttattctgttctattcaaagggacctaaatctaacattgattttaaaattaaaaaggaaaatactatagaccaaactgcaaatgtagtatttaggtacatgtccagtgaaccaattatctttggagaatcgtctatctttgtagagtataagaaatttagcaacgataaaggctttcctaaagaatatggttctggtaagattgtgttatataacggcgttaattatctaaataatatctattgtttggaatatattaatacacataatgaagtgggtattaagtccgtggttgtacctattaagtttatagcagaattcttagttaatggagaaatacttaaacctagaattgataaaaccatgaaatatattaactcagaagattattatggaaatcaacataatatcatagtcgaacatttaagagatcaaagcatcaaaataggagatatctttaacgaggataaactatcggatgtgggacatcaatacgccaataatgataaatttagattaaatccagaagttagttattttacgaataaacgaactagaggaccgttgggaattttatcaaactacgtcaagactcttcttatttctatgtattgttccaaaacatttttagacgattccaacaaacgaaaggtattggcgattgattttggaaacggtgctgacctggaaaaatacttttatggagagattgcgttattggtagcgacggatccggatgctgatgctatagctagaggaaatgaaagatacaacaaattaaactctggaattaaaaccaagtactacaaatttgactacattcaggaaactattcgatccgatacatttgtctctagtgtcagagaagtattctattttggaaagtttaatatcatcgactggcagtttgctatccattattcttttcatccgagacattatgctaccgtcatgaataacttatccgaactaactgcttctggaggcaaggtattaatcactaccatggacggagacaaattatcaaaattaacagataaaaagacttttataattcataagaatttacctagtagcgaaaactatatgtctgtagaaaaaatagctgatgatagaatagtggtatataatccatcaacaatgtctactccaatgactgaatacattatcaaaaagaacgatatagtcagagtgtttaacgaatacggatttgttcttgtagataacgttgatttcgctacaattatagaacgaagtaaaaagtttattaatggcgcatctacaatggaagatagaccgtctacaaaaaactttttcgaactaaatagaggagccattaaatgtgaaggtttagatgtcgaagacttacttagttactatgttgtttatgtcttttctaagcggtaaataataatatggtatgggttctgatatccccgttctaaatgcattaaataattccaatagagcgatttttgttcctataggaccttccaactgtggatactctgtattgttaatagatatattaatacttttgtcgggtaacagaggttctacgtcttctaaaaataaaagttttataacatctggcctgttcataaataaaaacttggcgattctatatatactcttattatcaaatctagccattgtcttatagatgtgagctactgtaggtgtaccatttgattttctttctaatactatatatttctctcgaagaagttcttgcacatcatctgggaataaaatactactgttgagtaaatcagttattttttttatatcgatattgatggacatttttatagttaaggataataagtatcccaaagtcgataacgacgataacgaagtatttatacttttaggaaatcacaatgactttatcagattaaaattaacaaaattaaaggagcatgtatttttttctgaatatattgtgactccagatacatatggatctttatgcgtcgaattaaatgggtctagttttcagcacggtggtagatatatagaggtggaggaatttatagatgctggaagacaagttagatggtgttctacatccaatcatatatctaaagatatacccgaagatatgcacactgataaatttgtcatttatgatatatacacttttgacgctttcaagaataaacgattggtattcgtacaggtacctccgtcgttaggagatgatagtcatttgactaatccgttattgtctccgtattatcgtaattcagtagccagacaaatggtcaataatatgatttttaatcaagattcatttttaaaatatttattagaacatctgattagaagccactatagagtttctaaacatataacaatagttagatacaaggataccgaagaattaaatctaacgagaatatgttataatagagataagtttaaggcgtttgtattcgcttggtttaacggcgtttcggaaaatgaaaaggtactagatacgtataaaaaggtatctaatttgatataatgaattcagtgactgtatcacacgcgccatatactattacttatcacgatgattgggaaccagtaatgagtcaattggtagagttttataacgaagtagccagttggctgctacgagacgagacgtcgcctattcctgataagttctttatacagttgaaacaaccgcttagaaataaacgagtatgtgtgtgcggtatagatccgtatccgaaagatggaactggtgtaccgttcgaatcaccaaattttacaaaaaaatcaattaaggagatagcttcatctatatctagattaaccggagtaattgattataaaggttataaccttaatataatagacggggttataccctggaattattacttaagttgtaaattaggagaaacaaaaagtcacgcgatctactgggataagatttccaagttactgctgcagcatataactaaacacgttagtgttctttattgtttgggtaaaacagatttctcgaatatacgggcaaagttagaatccccggtaactaccatagtcggatatcatccagcggctagagaccgccaattcgagaaagatagatcatttgaaattatcaacgttttactggaattagacaacaaggcacctataaattgggctcaagggtttatttattaatgctttagtgaaattttaacttgtgttctaaatggatgcggctattagaggtaatgatgttatctttgttcttaagactataggtgtcccgtcagcgtgcagacaaaatgaagatccaagatttgtagaagcatttaaatgcgacgagttagaaagatatattgagaataatccagaatgtacactattcgaaagtcttagggatgaggaagcatactctatagtcagaattttcatggatgtagatttagacgcgtgtctagacgaaatagattatttaacggctattcaagattttattatcgaggtgtcaaactgtgtagctagattcgcgtttacagaatgcggtgccattcatgaaaatgtaataaaatccatgagatctaatttttcattgactaagtctacaaatagagataaaacaagttttcatattatctttttagacacgtataccactatggatacattgatagctatgaaacgaacactattagaattaagtagatcatctgaaaatccactaaccagatcgatagacactgccgtatataggagaaaaacaactcttcgggttgtaggtactaggaaaaatccaaattgcgacactattcatgtaatgcaaccaccgcatgataatatagaagattacctattcacttacgtggatatgaacaacaatagttattacttttctctacaacaacgattggaggatttagttcctgataagttatgggaaccagggtttatttcattcgaagacgctataaaaagagtttcaaaaatattcattaattctataataaactttaatgatctcgatgaaaataattttacaacggtaccactggtcatagattacgtaacaccttgtgcattatgtaaaaaacgatcgcataaacatccgcatcaactatcgttggaaaatggtgctattagaatttacaaaactggtaatccacatagttgtaaagttaaaattgttccgttggatggtaataaactgtttaatattgcacaaagaattttagacactaactctgttttattaaccgaacgaggagaccatatagtttggattaataattcatggaaatttaacagcgaagaacccttgataacaaaactaattttgtcaataagacatcaactacctaaggaatattcaagcgaattactctgtccgaggaaacgaaagactgtagaagctaacatacgagacatgttagtagattcagtggagaccgatacctatccggataaacttccgtttaaaaatggtgtattggacctggtagacggaatgttttactctggagatgatgctaaaaaatatacgtgtactgtatcaaccggatttaaatttgacgatacaaagttcgtcgaagacagtccagaaatggaagagttaatgaatatcattaacgatatccaaccattaacggatgaaaataagaaaaatagagagctatatgaaaaaacattatctagttgtttatgcggtgctaccaaaggatgtttaacattcttttttggagaaactgcaactggaaagtcgacaaccaaacgtttgttaaagtctgctatcggtgacctgtttgttgagacgggtcaaacaattttaacagatgtattggataaaggacctaatccatttatcgctaacatgcatttgaaaagatctgtattctgtagcgaactacctgattttgcatgtagtgggtcaaagaaaatcagatctgataatattaaaaagttgacagaaccttgtgtcattggaagaccgtgtttctccaataaaattaataatagaaaccatgcgacaatcattatcgatactaattacaaacctgtttttgataggatagataacgcattaatgagaagaattgccgtcgtgcgattcagaacacacttttctcaaccttctggtagagaggctgctgaaaataatgacgcgtacgataaagtcaaactattagacgaggggttagatggtaaaatacaaaataatagatatagattcgcatttctatacttgttggtgaaatggtacagaaaatatcatgttcctattatgaaactatatcctacacccgaagagattcctgactttgcattctatctcaaaataggtactctgttagtatctagctctgtaaagcatattccattaatgacggacctctccaaaaagggatatatattgtacgataatgtggttactcttccgttgactactttccaacagaaaatatccaagtattttaattctagactatttggacacgatatagagagcttcatcaatagacataagaaatttgccaatgttagtgatgaatatctgcaatatatattcatagaggatatttcatctccgtaaatatatgctcatatatttatagaagatatcacatatctaaatgaataccggaatcatagatttatttgataatcatgttgatagtataccaactatattacctcatcagttagctactctagattatctagttagaactatcatagatgagaacagaagcgtgttattgttccatattatgggatcaggtaaaacaataatcgctttgttgttcgccttggtagcttccagatttaaaaaggtttacattctagtgccgaacatcaacatcttaaaaattttcaattataatatgggtgtagctatgaacttgtttaatgacgaattcatagctgagaatatctttattcattccacaacaagtttttattctcttaattataacgataacgtcattaattataacggattatctcgctacaataactctatttttatcgttgatgaggcacataatatctttgggaataatactggagaacttatgaccgtgataaaaaataaaaacaagattccttttttactattgtctggatctcccattactaacacacctaatactctgggtcatattatagatttaatgtccgaagagacgatagattttggtgaaattattagtcgtggtaagaaagtaattcagacacttcttaacgaacgcggtgtgaatgtacttaaggatttgcttaaaggaagaatatcatattacgaaatgcctgataaagatctaccaacgataagatatcacggacgtaagtttctagatactagagtagtatattgtcacatgtctaaacttcaagagagagattatatgattactagacgacagctatgttatcatgaaatgtttgataaaaatatgtataacgtgtcaatggcagtattgggacaacttaatctgatgaataatttagatactttatttcaggaacaggataaggaattgtacccaaatctgaaaataaataatggcgtgttatacggagaagaattggtaacgttaaacattagttccaaatttaaatactttattaatcggatacagacactcaacggaaaacattttatatacttttctaattctacatatggcggattggtaattaaatatatcatgctcagtaatggatattctgaatataatggttctcagggaactaatccacatatgataaacggcaaaccaaaaacatttgctatcgttactagtaaaatgaaatcgtctttagaggatctattagatgtgtataattctcctgaaaacgatgatggtagtcaattgatgtttttgttttcatcaaacattatgtccgaatcctatactctaaaagaggtaaggcatatttggtttatgactatcccagatactttttctcaatacaaccaaattcttggacgatctattagaaaattctcttacgccgatatttctgaaccagttaatgtatatcttttagccgccgtatattccgatttcaatgacgaagtgacgtcattaaacgattacacacaggatgaattaattaatgttttaccatttgacatcaaaaagctgttgtatctaaaatttaagacgaaagaaacgaatagaatatactctattcttcaagagatgtctgaaacgtattctcttccaccacatccatcaattgtaaaagttttattgggagaattggtcagacaatttttttataataattctcgtattaagtataacgataccaagttacttaaaatggttacatcagttataaaaaataaagaagacgctaggaattacatagatgatattgtaaacggtcacttctttgtatcgaataaagtatttgataaatctcttttatacaaatacgaaaacgatattattacagtaccgtttagactttcctacgaaccatttgtttggggagttaactttcgtaaagaatataacgtggtatcttctccataaaactgatgagatatataaagaaataaatgtcgagctttgttaccaatggatacctttccgttacattggaaccacacgagctgacgttagacataaaaactaatattaggaatgccgtatataagacgtatctccatagagaaattagtggtaaaatggccaagaaaatagaaattcgtgaagacgtggaattacctctcggcgaaatagttaataattctgtagttataaacgttccgtgtgtaataacctacgcgtattatcacgttggggatatagtcagaggaacattaaacatcgaagatgaatcaaatgtaactattcaatgtggagatttaatctgtaaactaagtagagattcgggtactgtatcatttagcgattcaaagtactgcttttttcgaaatggtaatgcgtatgacaatggcagcgaagtcactgccgttctaatggaggctcaacaaggtatcgaatctagttttgtttttctcgcgaatatcgtcgactcataaaaaagagaatagcggtaagtataaacacgaatactatggcaataattgcgaatgttttattctcttcgatatatttttgataatatgaaaaacatgtctctctcaaatcggacaaccatctcataaaatagttctcgcgcgctggagaggtagttgccgctcgtataatctctccagaataatatacttgcgtgtcgtcgttcaatttatacggatttctatagttctctgttatataatgcggtttgccctcatgattagacgacgacaatagtgttctaaatttagatagttgatcagaatgaatgtttattggcgttggaaaaattatccatacagcgtctgcagagtggttgatagttgttcctagatatgtaaaataatccaacttactaggcagcaaattgtctagataaaatactgaatcaaacggtgcagacgtattggcggatctaatggaatccaattgattaactatcttttgaaaatatacatttttatgatccaatacttgtaagaatatagaaataatgataagtccatcatcgtgtttttttgcctcttcataagaactatattttttcttattccaatgaacaagattaatctctccagagtatttgtacacatctatcaagtgattggatccataatcgtcttcctttccccaatatatatgtagtgatgataacacatattcattggggagaaaccctccacttatatatcctcctttaaaattaatccttactagttttccagtgttctggatagtggttggtttcgactcattataatgtatgtctaacggcttcaatcgcgcgttagaaattgcttttttagtttctatattaataggagatagttgttgcggcatagtaaaaatgaaatgataactgtttaaaaatagctcttagtatgggaattacaatggatgaggaagtgatatttgaaactcctagagaattaatatctattaaacgaataaaagatattccaagatcaaaagacacgcatgtgtttgctgcgtgtataacaagtgacggatatccgttaataggagctagaagaacttcattcgcgttccaggcgatattatctcaacaaaattcagattctatctttagagtatccactaaactattacggtttatgtactacaatgaactaagagaaatctttagacggttgagaaaaggttctatcaacaatatcgatcctcactttgaagagttaatattattgggtggtaaactagataaaaaggaatctattaaagattgtttaagaagagaattaaaagaggaaagtgatgaacgtataacagtaaaagaatttggaaatgtaattctaaaacttacaacacgggataaattatttaataaagtatatataagttattgcatggcgtgttttattaatcaatcgttggaggatttatcgcatactagtatttacaatgtagaaattagaaagattaaatcattaaatgattgtattaacgacgataaatacgaatatctgtcttatatttataatatgctagttaatagtaaatgaacttttacagatctagtataattagtcagattattaagtataatagacgactagctaagtctattatttgcgaggatgactctcaaattattacactcacggcattcgttaaccaatgcctatggtgtcataaacgagtatccgtgtccgctattttattaactactgataacaaaatattagtatgtaacagacgagatagttttctctattctgaaataattagaactagaaacatgtttagaaagaaacgattatttctgaattattccaattatttgaacaaacaggaaagaagtatactatcgtcatttttttctctagatccagctactactgataatgatagaatagatgctatttatccgggtggcatacccaaaaggggtgagaatgttccagagtgtttatccagggaaattaaagaagaagttaatatagacaattcttttgtattcatagacactcggttttttattcatggcatcatagaagataccattattaataaattttttgaggtaatcttctttgtcggaagaatatctctaacgagtgatcaaatcattgatacatttaaaagtaatcatgaaatcaaggatctaatatttttagatccgaattcaggtaatggactccaatacgaaattgcaaaatatgctctagatactgcaaaacttaaatgttacggccatagaggatgttattatgaatcattaaaaaaattaactgaggatgattgattagaaaatataaattaatttaccatcgtgtatttttataacgggattgtccggcatatcatgtagatagttaccgtctacatcgtatactcgaccatctacgcctttaaatcctctatttattgacattaatctattagaattggaataccaaatattagtaccctcaattagtttattggtaatattttttttagacgatagatcgatggctcttgaaaccaaggttttccaaccggactcattgtcgatcggtgagaagtctttttcattagcatgaatccattctaatgatgtatgtttaaacactctaaacaattggacaaattcttttgatttgctttgaatgatttcaaataggtcttcgtctacagtaggcataccattagataatctagccattataaagtgcacgtttacatatctacgttctggaggagtaagaacgtgactattgagacgaatggctcttcctactatctgacgaagagacgcctcgttccatgtcatatctaaaatgaagatatcattaattgagaaaaaactaataccctcgcctccactagaagagaatacgcatgttttaatgcattctccgttagtgtttgattcttggttaaactcagccaccgccttgattctagtatcttttgttctagatgagaactctatattagagataccaaagactttgaaatatagtaataagatttctattcctgactgattaacaaatggttcaaagactagacatttaccatgggatgctaatattcccaaacatacatctataaatttgacgcttttctcttttaattcagtaaatagagagatatcagccgcactagcatcccctttcaatagttctccctttttaaaggtatctaatgcggatttagaaaactctctatctcttaatgaatttttaaaatcattatatagtgttgctatctcttgcgcgtattcgcccggatcacgattttgtctttcaggaaagctatcgaacgtaaacgtagtagccatacgtctcagaattctaaatgatgatatacctgtttttatttcagcgagtttagccttttgataaatttcttcttgctttttcgacatattaacgtatcgcattaatactgttttcttagcgaatgatgcagacccttctacgtcatcaaaaatagaaaactcgttattaactatatacgaacatagtcctcctagtttggagactaattctttttcatcgactagacgtttattctcaaatagtgattggtgttgtaaggatcctggtcgtagtaagttaaccaacatggtgaattcttgcacactattgacgataggtgtagccgataaacaaatcatcttatggttttttaacgcaatggtcttagataaaaaattatatactgaacgagtaggacggatcttaccatcttctttgattaatgatttagaaatgaagttatgacattcatcaatgatgacgcatattctactcttggaattaatagttttgatattagtaaaaaatttatttctaaaattttgatcatcgtaattaataaaaatacaatccttcgttatctctggagcgtatctgagtatagtgttcatccaaggatcttctatcaaagcctttttcaccaataagataatagcccaattcgtataaatatccttaagatgtttgagaatatatacagtagtcattgttttaccgacacccgtttcatggaacaataaaagagaatgcatactgtctaatcctaagaaaactcttgctacaaaatgttgataatccttgaggcgtactacgtccgaccccatcatttcaacgggcatattagtagttctgcgtaaggcataatcgatataggccgcgtgtgatttactcatttatgagtgataagtaataactatgttttaaaaatcacagcagtagtttaactagtcttctctgatgtttgttttcgatactttttgaatcagaagtcatactagaataaagcaacgagtgaacgtaatagagagcttcgtatactctattcgaaaactctaagaacttattaatgaattccgtatccactggattgtttaaaatactaaattgaacactgttcacatccttccaagaagaagacttagtgacggacttaacatgagacataaataaatccaaattttttttacaaacatcactagccaccataatggcgctatctttcaaccagctatcgcttacgcattttagcagtctaacatttttaaagagactacaatatattctcatagtatcgattacacctctaccgaataaagttggaagtttaataatacaatatttttcgtttacaaaatcaaataatggtcgaaacacgtcgaaggttaacatcttataatcgctaatgtatagattgttttcagtgagatgattattagatttaatagcatctcgttcacgtttgaacagtttattgcgtgcgctgaggtcggcaactacggcgtccgctttagtactcctcccataatactttacgctattaatctttaaaatttcatagactttatctagatcgctttctggtaacatgatatcatgtgtaaaaagttttaacatgtcggtcggcattctatttagatcattaactctagaaatctgaagaaagtaattagctccgtattccagactaggtaatgggcttttacctagagacagattaagttctggcaatgtttcataaaatggaagaaggacatgcgttccctcccggatattttttacaatttcatccatttacaactctatagtttgttttcattattattagttattatctcccataatcttggtaatacttaccccttgatcgtaagataccttatacaggtcattacatacaactaccaattgtttttgtacataatagattggatggttgacatccatggtggaataaactactcgaacagatagtttatctttccccctagatacattagccgtaatagttgtcggcctaaagaatatctttggtgtaaagttaaaagttagggttcttgttccattattgctttttgtcagtagttcattataaattctcgagatgggtccgttctctgaatatagaacatcatttccaaatctaacttctagtctagaaataatatcggtcttattcttaaaatctattcccttgatgaagggatcgttaatgaacaaatccttggcctttgattcggctgatctattatctccgttatagacgttacgttgactagtccaaagacttacaggaatagatgtatcgatgatgttgatactatgtgatatgtgagcaaagattgttctcttagtggcatcactatatgttccagtaatggcggaaaactttttagaaatgttatatataaaagaattttttcgtgttccaaacattagcagattagtatgaagataaacactcatattatcaggaacattatcaatttttacatacacatcagcatcttgaatagaaacgataccatcttctggaacctctacgatctcggcagactccggataaccagtcggtgggccatcgctaacaataactagatcatccaacaatctactcacatatgcatctatataatctttttcatcttgtgagtaccctggatacgaaataaatttattatccgtatttccataataaggtttagtataaacagagagagatgttgccgcatgaacttcagttacagtcgccgttggttggtttatttgacctattactctcctaggtttctctataaacgatggtttaatttgtacattcttaaccatatatccaataaagctcaattcaggaacataaacaaattctttgttgaacgtttcaaagtcgaacgaagagtcacgaataacgatatcggatactggattgaaggttaccgttacggtaatttttgaatcggatagtttaagactgctgaatgtatcttccacatcaaacggagttttaatataaacgtatactgtagatggttctttaatagtgtcattaggagttaggccaatagaaatatcattaagttcactagaatatccagagtgtttcaaagcaattgtattattgatacaattattatataattcttcgccctcaatttcccaaataacaccgttacacgaagagatagatacgtgattaatacatttatatccaacatatggtacgtaactgaatcttcccatacctttaacttctggaagttccaaactcagaaccaaatgattaagcgcagtaatatactgatccctaatttcgaagctagcgatagcctgattgtctggaccatcgtttgtcataactccggatagagaaatatattgcggcatatataaagttggaatttgactatcgactgcgaagacattagaccgtttaatagagtcatccccaccgatcaaagaattaatgatagtattattcattttctatttaaaatggaaaaagcttacaataaactccgtagagaaatatctataatttgtgagttttccttaaagtaacagcttccgtaaacgccgtctttatctcttagtaggtttattgtatttatgaccttttccttatcttcatagaatactaaaggcaacaaagaaatttttggttcttctctaagagctacgtgagacttaaccatagaagccaacgaatccctacatattttagaacagaaataccctacttcaccacccttgtatgtctcaatactaataggtctaaaaaccaaatcttgattacaaaaccaacacttatcaattacactatttgtcttaatagacacatctgccatagatttataatactttggtagtatacaagcgagtgcttcttctttagcgggcttaaagactgctttaggtgctgaaataaccacatctggaaggcttactcgcttagccatttaattacggaactatttttttatacttctaatgagcaagtagaaaacctctcatctacaaaaacgtactcgtgtccataatcctctaccatagttacacgttttttagatctcatatgtgctaaaaagttttcccatactaattggttactattatttttcgtataatttttaacagtttgaggttttagatttttagttacagaagtgatatcgaatattttatccaaaaagaatgaataattaattgtcttagaaggagtgttttcttggcaaaagaataccaagtgcttaaatatttctactacttcattaatcttttctgtactcagattcagtttctcatcttttacttgattgattatttcaaagactaacttataatcctttttatttattctctcgttagccttaagaaaactagatacaaaatttgcatctacatcatccgtggatatttgatttttttccatgatatccaagagttccgagataatttctccagaacattgatgagacaataatctccgcaatacatttctcaaatgaataagtttattagacacgtggaagtttgactttttttgtacctttgtacatttttgaaataccgactcgcaaaaaatacaatattcatatccttgttcagatactataccgttatgtctacaaccgctacataatcgtagattcatgttaacactctacgtatctcgtcgtccaatattttatataaaaacattttatttctagacgttgccagaaaatcctgtaatatttttagttttttgggctgtgaataaagtatcgccctaatattgttaccgtcttccgccaatatagtagttaaattatccgcacatgcagaagaacaccgcttaggcggattcagtacaatgttatatttttcgtaccaactcatttaaatatcataatctaaaatagttctgtaatatgtctagcgctaatatattgatcataatcctgtgcataaattaagatacaacaatgtctcgaaatcatcgacatggcttcttccatagttagaagatcgtcgtcaaagttagcaacgtgattcatcaacatttgctgttttgaggcagcaaatactgaaccgtcgccattcaaccattcataaaaaccatcgtctgaatccattgataatttcttgtactggtttttgagagctcgcatcaatctagcatttctagctcccggattgaaaacagaaagaggatcgtacatccagggtccattttctgtaaatagaatcgtataatgtcccttcaagaagatatcagacgatccacaatcaaagaattggtctccgagtttgtaacaaactgcggactttaacctatacatgataccgtttagcataatttctggtgatacgtcaatcggagtatcatctattagagatctaaagccggtgtaacattctccaccaaacatattcttattctgacgtcgttctacataaaacatcattgctccattaacgataacaggggaatgaacagcactacccatcacattagttcccaatggatcaatgtgtgtaactccagaacatcttccatagcctatgttaggaggagcgaacaccactcttccactattgccatcgaatgccatagaataaatatccttggaattgatagaaatcggactgtcggatgttgtgatcatcttcataggattaacaactatgtatggtgccgcctgaagtttcatatcgtaactgatgccgtttataggtctagccacagaaaccaacgtaggtctaaatccaactatagacaaaatagaagccaatatctgttcctcatctgtcataacttgagagcatccagtatgaataatcttcattagatggggatctaccgcatcatcatcgttacaataaaaaattcccattctaatgttcataattgcttttctaatcatggtatgcatgtttgctctctgaatctctgtggaaattagatctgatacacctgtaatcactatcggattatcctccgtaagacgattaaccaacaacatataattataagactttacttttctaaattcataaagttgctggattaggctataggtgtctccatgtacatacgcgttctcgagcgcaggaagtttaataccgaatagtgccatcagaataggatgaatatagtaattagtttctggttttctataaataaaagacaaatcttgtgaactagacatatcggtaaaatgcatggattggaatcgtgtagtcgacagaagaatatgatgattagatggagagtatattttatctaactctttgagttggtcaccgattctaggactagctcgagaatgaataagtactaaaggatgagtacatttcacagaaacactagcattgttcaatgtgctctttacatgggtaaggagttgaaatagctcgtttctatttgttctgacaatatttagtttattcataatgttaagcatatcctgaatagtaaagttagatgtgtcatacttgttagtagttagatatttagcaattgcattcccatcatttctcaatctcgtactccaatcatgcgtggatgctacttcgtcgatggaaaccatacaatcctttttgataggctgttgagattgattatttcctgcacgtttaggtttggtacgttgatttctagcccctgcggatataaagtcatcgtctacaatttgggacaatgaattgcatacactacaagacaaagatttatcagaagtgtgaatatgatcttcatctaccaaagaaagagtttgattagtataactagattttagtcctgcgttagatgttaaaaaaacatcgctattgaccacggcttccattatttatattcgtagtttttactcgaaagcgtgattttaatatccaatcttattacttttggaatcgttcaaaacctttgactaattgtagaatttgatctattgccctacgcgtatactcccttgcatcatatacgttcgtcaccagatcgtttgtttcggcctgaagttggtgcatatctctttcaacattcgacatgagatccttaagggccatatcgtctagattttgttgagatgctgctcctggatttggattttgttgtgctgttgtacatactgtaccaccagtaggtgtaggagtacatacagtggccacaataggaggttgaggaggtgtaaccgttggagtagtacaagaaatatttccatccgattgttgtgtacatgtagttgttggtaacgtctgagaaggttgggtagatggcggtgtcgtcgtcttttgatctttattaaatttagagataatatcctgaacagcattgctcggcgtcaacgctggaaggagtgaactcgccggcgcatcagtatctgcagacagccaatcaaaaagattagacatatcagatgatgtattagtttgttgtcgtggttttggtgtaggagcagtactactaggtagaagaataggagccggtgtagctgttggaaccggctgtggagttatatgaatagttggttgtagcggttggataggctgtctgctggcggccatcatattatctctagctagttgttctcgcaactgtctttgataatacgactcttgagactttagtcctatttcaatcgcttcatcctttttcgtatccggatccttttcttcagaataatagattgacgactttggtgtagaggattctgccagcctctgtgagaacttgttaaagaagtccatttaaggctttaaaattgaattgcgattataagattaaatggcagacacagacgatattatcgactatgaatccgatgatctcaccgaatacgaggatgatgaagaagaggaagaagatggagagtcactagaaactagtgatatagatcccaaatcttcttataagattgtagaatcagcatccactcatatagaagatgcgcattccaatcttaaacatatagggaatcatatatctgctcttaaacgacgctatactagacgtataagtctatttgaaatagcgggtataatagcagaaagctataacttgcttcaacgaggaagattacctctagtttcagaattttctgacgaaacgatgaagcaaaatatgctacatgtaattatacaagagatagaggagggttcttgtcctatagtcatcgaaaagaacggagaattgttgtcggtaaacgattttgacaaagatggtctaaaattccatctagactatattatcaaaatttggaaacttcaaaaacgatattagaatttatacgaatatcgttctctaaatgtcacaatcaagtctcgcatgttcagcaatttattgtcgtactttatatcgtgttcattaacgatattttgcaaaatagtaatgattctatcttccttcgatagatattcttcagagattattgtcttatattctttcttgttatccgatatgaatttgataagactttgaacattattgatacccgtctgtttaattttttctacagatattttagttttggcagattctatcgtatctgtcaatagacatccaacatcgacattcgacgtcaattgtctataaatcaacgtataaattttagaaataacattagcgaattgttgtgcattgatgtcgttattctgaaacagtatgattttaggtagcattttcttaacaaagagaacgtatttattgttactcagttgaacagatgatatatccagattactaacgcatctgattccgtataccaaactttcagaagaaatggtatacaattgtttgtattcattcaatgtctctttttcagaaattagtttagagtcgaatactgcaataattttcaagagatagttttcatcagataagattttatttagtgtagatatgataaaactattgttttgttggagaacttgatacgccgcgttctctgtagtcgacgctctcaaatgggaaacaatctccattatttttttggaatcggatactatatcttcggtatcttgacgcagtctagtatacatagagttaagagagattagagtttgtacattaagcaacatgtctctaaatgtggctacaaacttttcctttttcacatcatctagtttattatataccgatttcacaacggcaccagatttaaggaaccagaatgaaaaactctgataactacaatatttcatcatagttacgattttatcatcttctatagttggtgtaatagcgcatacctttttctccaagactggaaccaacgtcataaaaatgtttaaatcaaaatccatatcaacatctgatgcgctaagaccagtctcgcgttcaagattatctttactaatggtgacgaactcatcgtataaaactctaagtttgtccattatttatttacagatttagttgtttaatttatttgtgctcttccagagttgggatagtatttttctaacgtcggtattatattattaggatctacgttcatatgtatcataatattaatcatccacgttttgataaatctatctttagcttctgaaataacgtatttaaacaaaggagaaaaatatttagctacggcatcagacgcaataacattttttgtaaatgtaacgtatttagacgacagatcttcgttaaaaagttttccatctatgtagaatccatcggttgttaacaccattcccgcgtcagattgaataggagtttgaatagtttgttttggaaatagatccttcaataacttatagttgggtgggaaaaaatcgattttatcactagactctttcttttttactatcattacctcatgaactatttcttgaatgagtatatgtattttctttcctatatcggacgcgttcattggaaaatataccatgtcgttaactataagaatatttttatcctcgtttacaaactgaataatatcagatgtagttcgtaaacgaactatatcatcaccagcacaacatctaactatatgatatccactagtttcctttagccgtttattatcttgttccatattagcagtcattccatcatttaagaaggcgtcaaagataatagggagaaatgacattttggattctgttacgactttaccaaaattaaggatatacggacttactatctttttctcaacgtcaatttgatgaacacacgatgaaaatgtgcttctatgagattgatcatgtagaaaacaacaagggatacaatatttccgcatatcatgaaatatattaagaaatcccaccttattatatttccccaaaggatccatgcacgtaaacattatgccgttatcattaataaagacttctttctcatcggatctgtaaaagttgttactgatttttttcattccaggatctagataattaataatgatgggttttctattcttattctttgtattttggcatatcctagaccagtaaacagtttccactttggtaaaatcagcagacttttgaacgctattaaacatggcattaatggcaataactaaaaatgtaaaatatttttctatgttaggaatatggtttttcactttaatagatatatggtttttggccaaaatgatagatatttttttatccgaggatagtaaaatattattagtcgccgtctctataaaaatgaagctagtctcgatatccaattttattctagaattgataggagtcgccaaatgtaccttatacgttatatctcccttgatgcgttccatttgtgtatctatatcggacacaagatctgtaaatagttttacgttattaatcatcacggtatcgccgtcgctagataacgctaatgtaccatccaagtcccaaatggagagatttaactgttcatcgtttagaataaaatgattaccggtcatattaataaagtgttcatcgtatctagataacaacgacttataattaatgtccaagtcttgaactcgctgaatgatcttttttaacccagttagttttagattggtacgaaatatattgttaaactttgattctacagtaatgtccaaatctagttgtggaaatacttccatcaacattgtttcaaacttgataatattattatctacatcttcgtacgatccaaattccggaatagatgtatcgcacgctctggccacccagataaccaaaaagtcacacgctccaggatatacattgtataaaaagctatcgttttttagtagggtttttttctgcgtgtatacgaagggattaaaaatagtattatcaacgtaactatattccaaattattcttatgagaatagataataatatcgtccttaatatctaacaaatttcctaaatatccctttaattgagtcattcgaagcgtcaatagaatatgtctcttaactatttccggctgttgtatatttaaatgacttcgtaaaaaataatatatgggcgacttctcatctatgtaatcatatggagtgagatatagggctcgttctacctcctgccccttacccacctgtaataccaattgcggacttactatatatcgcatatttatatcgtggggtaaagtgaaaatctactaccgatgatgtaagtcttacaatgttcgaaccagtaccagatcttaatttggaggcctccgtagaactaggggaggtaaatatagatcaaacaacacctatgataaaggagaatagcggttttatatcccgcagtagacgtctattcgcccatagatctaaggatgatgagagaaaactagcactacgattctttttacaaagactttattttttagatcatagagagattcattatttgttcagatgcgttgacgctgtaaaagacgtcactattaccaaaaaaaataacattatcgtggcgccttatatagcacttttaactatcgcatcaaaaggatgcaaacttacagaaacaatgattgaagcattctttccagaactatataatgaacatagtaagaaatttaaattcaactctcaagtatccatcatccaagaaaaactcggataccagtttggaaactatcacgtttatgattttgaaccgtattactctacagtagctctggctattcgagatgaacattcatctggcatttttaatatccgtcaagagagttatctggtaagttcattatctgaaataacatatagattttatctaattaatctaaaatctgatcttgttcaatggagtgctagtacgggcgctgtaattaatcaaatggtaaatactgtattgattacagtgtatgaaaagttacaactggtcatagaaaatgattcacaatttacatgttcattggctgtggaatcaaaacttccaataaaattacttaaagatagaaatgaattatttacaaaattcattaacgagttaaaaaagaccagttcattcaagataagcaaacgcgataaggatacgctactaaaatattttacttaggactggagttagaatttatagacgactcatttcgtttatcattgttactattattactattactatcattattagtgttggcattattagtattcttcttgtcatcttgttcagaaatatacagcaatgctatacctaatactaaatacattatcatgctcgcaatggctctaacaacaacgaaccaaaatgaatttggtcgtagcttttgttcacaaaaatacataaagaaatgtctacataaatctatggcgccattggctacttgaaatagcgccagtcctcctacagattttaatatagctgtataacatgacatttattcatcatcaaaagagacagagtcaccatctgtcatatttagattttttttcatgtgttcaaagtatcctctactcatttcattataatagtttatcatacttagaattttaggacggatcaatgagtaagacttgactagatcgtcagtagtaatttgtgcatcgtctattctgcatccgcttcgtcgaataatgtatagcatcgctttgagattctccatagctatcaagtctttatacaatgacatggaaatatctgtgaatactttatacttctccaacatcgatgccttaacatcatcgcctactttagcattgaaaatacgttctattgtgtagatggatgtagcaagatttttaaacaacaatgccatcttacacgatgattgcctcaagtctccaatcgtttgtttagaacgattagctacagagtccaatgcttggctgactagcatattattatctttagaaattgtattcttcaatgaggcgtttatcatatctgtgatttcgttagtcatattacagtctgactgggttgtaatgttatccaacatatcacctatggatacggtacacgtaccagcatttgtaataatcctatctaagatgttgtatggcattgcgcagaaaatatcttctcctgtaatatctccactctcgataaatctactcagattattcttaaatgccttattctctggagaaaagatatcagtgtccatcatttcattaatagtatacgcagaaaagataccacgagtatcaattctatccaagatacttatcggttccgagtcacagataatggtttcctctccttcgggagatcctgcatagaaatatctaggacaatagtttctatactgtctgtaactctgataatctctaaagtcactaactgataccatgaaattgagaagatcaaacgctgaagtaattaatttttctgcctcgtttttactacaactagttttcatcaatgtagtgacgatgtattgtttagttacttttggtctaatactgatgatagagatattattgcttcccataatggatcttctagtagtcaccttaaagcccattgatgcgaatagcagatagataaagtcttggtatgactcctttctaatatagtacggactacctttgtcacccaactttatacccacataagccataacaacctctttaatagccgtttcatgaggtttatcagccatgagcctgagtagttggaagaatctcatgaatcccgtctcagaaagtcctatatgcatgatagatttatctttcctgggaaactctcgtatagtcatagatgaaatactctttaaagtttctgaaataagattagtaacagtcttacctccgactactctaggtaacaaacaaactctaataggtgttttctctgcggagataatatcagaaaggatagagcaataagtagtattattgtgattataaagaccgaatacataacaggtagaatttataaacatcatgtcctgaaggtttttagacttgtattcctcgtaatccataccgtcccaaaacatggatttggtaactttgatagccgtagatctttgttccttcgccaacaggttaaagaaattaataaagaatttgttgtttctatttatgtccacaaattgcacgtttggaagcgccacggttacattcactgcagcattttgaggatcgcgagtatgaagtacgatgttattgtttactggtatatctggaaagaaatctaccagtctaggaataagagattgatatcgcatagaaatagtaaagtttataatctcatcatcgaagagcattttgttaccattgtaataaatatccactctgtcatatgtataaatgaagtactgttcaaacatgatgagatgtttatatgttggcatagtagtgagatcgacgtttggtaatggcaatgtattaagattaactccataatgtctagcagcatctgcgatgttataagcgtcgtcaaagcggggtcgatcttgtattgttatatattgtctaacacctataagattatcaaaatcttgtctgcttaatacaccgttaacaatttttgccttgaattcttttattggtgcattaataacatccttatagaggatgttaaacaaataagtgttatcaaagttaagatctggatatttcttttctgctagaacatccattgagtcggagccatctggtttaatataaccaccgataaatctagctctgtattctgtatccgtcaatctaatattaagaaggtgttgagtgaaaggtggaagatcgtaaaagctgtgagtattaatgataggattagtttccgaactaatgttaattggggtattaataatatctatatttccagcgttaagtgtaacattaaacagttttaattcacgtgacgtggtatcaattaaataattaatgcccaatttggatatagcagcctgaagctcatcttgtttagttacggatcctaatgagttattaagcaatatatcgaacggatgaacgaaggttgttttaagttggtcacatactttgtaatctagacatagatgcggaagaacggtagaaactatacgaaataaatattcagagtcctctaattgatcaagagtaactattgacttaataggcatcatttatttagtattaaatgacgaccgtaccagtgacggatatacaaaacgatttaattacagagttttcagaagataattatccatctaacaaaaattatgaaataactcttcgtcaaatgtctattctaactcacgttaacaacgtggtagatagagaacataatgccgccgtagtgtcatctccagaggaaatatcctcacaacttaatgaagatctatttccagatgatgattcaccggccactattatcgaacgagtacaacctcatactactattattgacgatactccacctcctacgtttcgtagagagttattaatatcggaacaacgtcaacaacgagaaaaaagatttaatattacagtatcgaaaaatgctgaagcaataatggaatctagatctatgataacttctataccaacacaaacaccatccttgggagtagtttatgataaagataaaagaattcagatgttagaggatgaagtggttaatcttagaaatcaacgatctaatacaaaatcatctgataatttagataattttaccaaaatactatttggtaagactccgtacaaatcaacagaagttaataagcgtatagccatcgttaattatgcaaatttgaacgggtcccccttatcagtcgaggacttggatgtttgttcggaggatgaaatagatagaatctataaaacgattaaacaatatcacgaaagtagaaaacgaaaaattatcgtcactaacgtgattattattgtcataaacattatcgagcaggcattgctaaaactcggatttgaagaaatcaaaggactgagtaccgatatcacttcagaaattatcgatgtggagatcggagatgactgcgatgctgtagcatctaaactaggaatcggtaacagtccggttcttaatattgtattgtttatactcaagatattcgttaaacgaattaaaattatttaatttaatacattcccatatccagacaacaatcgtctggattaatctgttcctgtcgtctcataccggacgacatattaatctttttattagtgggcatctttttagatggtttctttttcccagcattaactgagtcgatacctagaagatcgtgattgatctctccgaccattccacgaacttctaattggccgtctctgacggtaccataaactattttaccagcattagtaacagcttggacaatctgaccatccatcgcattgtacgatgtagtagtaactgttgttctacgtctaggagcaccagaagtatttttggagcccttggatgttgatgtagaagaagacgaggattttgattttggtttacatgtaatacattttgaactctttgattttgtatcacatgcgccggcagtcacatctgtttgagaattaagattattgttgcctcctttgacggctgcatctccaccgatttgcgctagtagatttttaagctgtggtgtaatcttattaactgtttcgatataatcatcgtaactgcttctaacggctaaattttttttatccgccatttagaagctaaaaatatttttatttatgcagaagatttaactagattatacaatgaactaatatgatccttttccagattatttacaaacttggtattttttggttctggaggaggcgaatttaaattcggacttggattcggattttgtaagttcttgatcttattatacatcgagtataggatggcgacagtaactgctacacaaataccgatcaaaagaagaataccaatcatttattgacaataacttcactattgatcaagtatgcaatatatcatcttttcactaaataagtagtaataatgattcaacaatgtcgagatatatggacgataataatttagttcatggaaatatcgctatgattggtgtgaatgactccgctaactctgtggggtgcgcagtgctttccccacatagaataaattagcattccgactgtgataataataccaagtataaacgccataatactcaatactttccatgtacgagtgggactggtagacttactaaagtcaataaaggcgaagatacacgaaagaatcaaaagaatgattccagcgattagcacgccggaaaaataatttccaatcataagcatcatgtccatttaactaataaaaattttaaatcgccgaatgaacaaagtggaatataaaccatataaaaacaatagtttgtactgcaaaaataatatctatttttgttttcgaagatatggtaaaattaaatagtagtacacagcatgttataactaacagcagcaacggctcgtaattacttatcatttactagacgaaaaggtggtgggatattttcttgctcaaataatacgaatatatcacccatccattttatgcgatgtttatatactctaatctttaatagatctatagacgacgggtttaccaacaatatagattttatcgattcatctaatttaaacccttccttaaacgtgaatgatctattatctggcataacgatgaccctacctgatgaatcggacaatgtactgggccatgtagaataaattatcaacgaattatcgtctacgaacatttatatcatttgttttaattttaggacgcgaataaatggatataaaatagaaaataacagatattacaaccagtgttatggccgcgcccaaccaggtaggcagttttattttatcttttactacaggttctcctggatgtacgtcaccaacggcggacgtagttctagtacaattagacgtaagttccgcttgggaattttttaacgctaaagagttaacgttaatcgtgcacccaacgtatttacatctagttcgttgaacatcttgattataatataaccattttctatctctagattcgtcagtgcactcatgtaaccaacataccctaggtcctaaatatttatctccggaattagattttggataattcgcgcaccaacaatttctatttcctttatgatcgttacaaaagacgtataatgccgtatccccaaaagtaaaataatcaggacgaataattctaataaactcagaacaatatctcgcatccatatgtttggagcaaatatcggaataagtagacatagccggtttccgttttgcacgtaaccattctaaacaattggggtttccaggatcgtttctacaaaatccagtcatgaaatcgtcacaatgttctgtcttgtaattattattaaatatttttggacagtgtttggtatttgtcttagaacaacattttgccacgctatcactatcgcccaggagataatccttttttataaaatgacatcgttgcccggatgctatataatcagtagcgtgttttaaatccttaatatattcaggagttacctcgttctgataatagattaatgatccaggacgaaatttgaaagaactacatggttctccatgaattaatacatattgtttagcaaattcaggaactataaaactactacaatgatctatcgacataccatctatcaaacaaaacttgggtttaatttctcccggagatgtttcataatagtacgtataactttcttctgcaaacttaacagctctattatattcaggataattaaaacctaattccatatatttgtctcgtatatctgctattcctggtgctattttgattctattaagagtaacagctgcccccattcttaataatcgtcagtatttaaactgttaaatgttggtatatcaacatctaccttatttcccgcagtataaggtttgttgcaggtatactgttcaggaatggttacatttatacttcttctatagtcctgtctttcgatgttcatcacatatgcaaagaacagaataaacaaaataatgtaagaaataatattaaatatctgtgaattcgtaaatacattgattgccataataattacagcagctacaatacatacaatagacattcccacagtgttgccattacctccacgatacatttgagttactaagcaataggtaataactaagctagtaagaggcaatagaaaagatgagataaatatcatcaatatagagattagaggagggctatatagagccaagacgaacaaaatcaaaccgagtaacgttctaacatcattatttttgaagattcccaaataatcattcattcctccataatcgttttgcatcatacctccatctttaggcataaacgattgctgctgttcctctgtaaataaatctttatcaagcactccagcacccgcagagaagtcgtcaagcatattgtaatatcttaaataactcatttatatattaaaaaatgtcactattaaagatggagtataatctttatgccgaactaaaaaaaatgacttgtggtcaacccctaagtctttttaacgaagacggggatttcgtagaagttgaaccgggatcatcctttaagtttctgatacctaagggattttacgcctctccttccgtaaagacgagtctagtattcgagacattaacaacgaccgataataaaatcactagtatcaatccaacaaatgcgccaaagttatatcctcttcaacgcaaagtcgtatctgaagtagtttctaatatgaggaaaatgatcgaatcaaaacgtcctctatacattactcttcacttggcgtgtggatttggtaagactattaccacgtgttatcttatggctacacacggtagaaaaaccgtcatttgcgtacccaataaaatgttaatacatcaatggaagacacaggtagaggcagtcggattggaacataagatatccatagatggagtaagtagtctattaaaggaactaaagactcaaagtccggatgtattaatagtagtcagtagacatctgacaaacgatgccttttgtaaatatatcaataagcattatgatttgttcatcttggatgaatcacatacgtataatctgatgaacaatacagcagttacaagatttttagcgtattatcctccgatgatgtgttattttttaactgctacacctagaccatctaaccgaatttattgtaacagtattattaatattgccaagttatccaatctaaaaaaaactatctatgcagtagatagtttttttgagccatattccacagataatattagacatatggtaaaacgactagatggaccatctaataaatatcatatatataccgagaagttattatctgtagacgagcctagaaatcaacttattcttgataccctggtagaagaattcaagtcaggaactattaatcgcattttagttattactaaactacgtgaacatatggtattattctacaaacgattattagattttttcggaccagaggttgtatttataggagacgcccaaaatagacgtactccagatatggtcaaatcaatcaaggaactaaatagatttatattcgtatccaccttattttattccggtactggtttagatattcctagtttggattcgttgttcatttgctcggcagtaatcaacaatatgcaaatagagcaattactagggagggtatgtcgagaaacagaactattagataggacggtatatgtatttcctaacacatccatcaaagaaataaagtacatgataggaaatttcatgcaacgaattattagtctgtctgtagataaactaggatttaaacaaaaaagttatcggaaacatcaagaatccgatcccacttctgcatgtacaacatcatccagagaagaacgtgtattaaatagaatatttaactcgcaaaatcgttaagaagtttaagcgacgatccgcatgctgcgcaggccagtgtattacccctcatagtattaatataatccaatgatacttttgtgatgtcggaaatcttaaccaatttagactgacaggcagaacacgtcatgcaatcatcatcgtcatcgataactgtagtcttgggcttctttttgcgactcttcattccggaacgcacattggtgctatccatttaggtagtaaaaaataagtcagaatatgccctataacacgatcgtgcaaaacctggtatatcgtctctatctttatcacaatatagtgtatcgacatttttattattattgacctcgtttatcttggaacatggaatgggaacatttttgttatcaacggccatctttgccttaattccagatgttgtaaaattataactaaacagtctatcatcgacacaaatgaaattcttgtttagacgtttgtagtttacgtatgcggctcgttcgcgtctcattttttcagatattgcaggtactataatattaaaaataagaatgaaataacataggattaaaaataaagttatcatgacttctagcgctgatttaactaacttaaaagaattacttagtctgtacaaaagtttgagattttcagattctgcggctatagaaaagtataattctttggtagaatggggaacatctacttactggaaaataggcgtgcaaaaggtagctaatgtcgagacgtcaatatctgattattatgatgaggtaaaaaataaaccgtttaatattgatccgggctattacattttcttaccggtatattttgggagcgtctttatttattcgaagggtaaaaatatggtagaacttggatctggaaactcttttcaaataccagatgatatgcgaagtgcgtgtaacaaagtattagacagcgataacggaatagactttctgagatttgttttgttaaacaatagatggataatggaagatgctatatcaaaatatcagtctccagttaatatatttaaactagctagtgagtacggattaaacatacccaaatatttagaaattgaaatagaggaagacacattatttgacgacgagttatactctattatagaacgctctttcgatgataaatttccaaaaatatccatatcgtatattaagttgggagaacttagacggcaagttgtagactttttcaaattctcattcatgtatattgagtccatcaaggtagatcgtataggagataatatttttattcctagcgttataacaaaatcaggaaaaaagatattagtaaaagatgtagaccatttaatacgatccaaggttagagaacatacatttgtaaaagtaaaaaagaaaaacacattttccattttatacgactatgatggaaacggaacagaaactagaggagaagtaataaaacgaattatagacactataggacgagactattatgttaacggaaagtatttctctaaggttggtagtgcaggcttaaagcaattgactaataaattagatattaatgagtgcgcaactgtcgatgagttagttgatgagattaataaatccggaactgtaaaacgaaaaataaaaaaccaatcagcatttgatttaagcagagaatgtttgggatatccagaagcggattttataacgttagttaataacatgcggttcaaaatagaaaattgtaaggttgtaaatttcaatattgaaaatactaattgtttaaataacccgagtattgaaactatatatggaaactttaaccagttcgtctcaatctttaatgtcgtcaccgatgtcaaaaaaagattattcgagtgaaataatatgcgcctttgatataggtgcaaaaaatcctgccagaactgttttagaagtcaaggataactccgttagggtattggatatatcaaaattagactggagttctgattgggaaaggcgcatagctaaagatttgtcacaatatgaatacactacagttcttctagaacgtcagcctagaaggtcgccgtatgttaaatttatctattttattaaaggctttttatatcatacatcggctgccaaagttatttgcgtctcgcctgtcatgtctggtaattcatatagagatcgaaaaaagagatcggtcgaagcatttcttgattggatggacacattcggattgcgagactccgttccggatagacgcaaattagacgatgtagcggatagtttcaatttggctatgagatacgtattagataaatggaatactaattatacaccttataataggtgtaaatctagaaattacataaaaaaaatgtaataacgttagtaacgccattatggataatctatttacctttctacatgaaatagaagatagatatgccagaactatttttaactttcatctaataagttgcgatgaaataggagatatatatggtcttatgaaagaacgcatttccttagaggatatgtttgataatatagtgtataataaagatatacatcctgccattaagaaactagtgtattgcgacatccaacttactaaacacattattaatcagaatacgtatccggtatttaacgattcttcacaagtgaaatgttgtcattatttcgacataaactcagataatagcaatattagctctcgtacagtagagatatttgagagggaaaagtcatctcttgtatcatatattaaaactaccaataagaagagaaaggtcaattacggcgaaataaagaaaactgttcatggaggcactaatgcaaattacttttccggtaaaaagtctgacgagtatctgagtactacagttagatccaacattaatcaaccttggatcaaaaccatctctaagaggatgagagttgatatcattaatcactctatagtaacgcgtggaaaaagctctatattacaaactatagaaattatttttactaatagaacatgtgtgaaaatattcaaggattctactatgcacattattctatccaaggacaaggatgaaaaggggtgtatacacatgattgacaaattattctatgtctattataatttatttctgttgttcgaagatatcatccaaaacgagtactttaaagaagtagctaatgttgtaaaccacgtactcacggctacggcattagatgagaaattattcctaattaagaaaatggctgaacacgatgtttatggagttagcaatttcaaaatagggatgtttaacctgacatttattaagtcgttggatcataccgttttcccctctctgttagatgaggatagcaaaataaagttttttaaggggaaaaagctcaatattgtagcattacgatctctggaggattgtataaattacgtgactaaatccgagaatatgatagaaatgatgaaggaaagatcgactattttaaatagcatagatatagaaacggaatcggtagatcgtctaaaagaattgcttctaaaatgaaaaaaaacactgattcagaaatggatcaacgactcggatataagtttttggtgcctgatcctaaagccggagttttttatagaccgttacatttccaatatgtatcgtattctaattttatattgcatcgattgcatgaaatcttgaccgtcaagcggccactcttatcgtttaagaataatacagaacgaattatgatagaaattagcaatgttaaagtgactcctccagattactcacctataatcgcgagtattaaaggtaagagttatgacgcattagccacgttcactgtaaatatctttaaagaggtaatgaccaaagagggtatatccatcactaaaataagtagttatgagggaaaagattctcatttgataaaaattccgctactaataggatacgggaataaaaatccacttgatacagccaagtatcttgttcctaatgtcataggtggagtctttatcaataaacaatctgtcgaaaaagtaggaattaatctagtagaaaagattacaacatggccaaaatttagggttgttaagccaaactcattcactttctcgttttcctccgtatcccctcctaatgtattaccgacaagatatcgccattacaagatatctctggatatatcacaattggaagcgttgaatatatcatcgacaaagacatttataacggtcaatattgttttgctgtctcaatatttatctagagtgagtctagaattcattagacgtagtttatcatacgatatgcctccagaagttgtctatctagtaaacgcgataatagatagtgctaaacgaattactgaatctattactgactttaatattgatacatacattaatgacctggtggaagctgaacacattaaacaaaaatctcagttaacgattaacgagttcaaatatgaaatgctgcataactttttacctcatatgaactatacacccgatcaactaaagggattttatatgatatctttactaagaaagtttctctactgtatcttccacacttctagatatccagatagagattcgatggtttgtcatcgcatcctaacgtacggcaaatattttgagacgttggcacatgatgaattagagaattacataggcaacatccgaaacgatatcatgaacaatcacaagaacagaggcacttacgcggtaaacattcatgtactaacaactcccggacttaatcacgcgttttctagcttattgagtggaaagttcaaaaagtcagacggtagttatcgaacacatcctcactattcatggatgcagaatatttctattcctaggagtgttggattttatccggatcaagtaaagatttcaaagatgttttctgtcagaaaataccatccaagtcaatatctttacttttgttcatcagacgttccggaaagaggtcctcaggtaggtttagtatctcaattgtctgtcttgagttccattacaaatatactaacgtctgagtatttggatttggaaaagaaaatttgtgagtatatcagatcatattataaagatgatataagttactttgaaacaggatttccaatcactatagaaaatgctctagtcgcatctcttaatccaaatatgatatgtgattttgtaactgactttagacgtagaaaacggatgggattcttcggtaacttggaggtaggtattactttagttagggatcacatgaatgaaattcgcattaatattggagcgggaagattagtcagaccattcttggttgtggataacggagagctcatgatggatgtgtgtccggagttagaaagcagattagacgacatgacattctctgacattcagaaagagtttccgcatgtcatcgaaatggtagatatagaacaatttacttttagtaacgtatgtgaatcggttcaaaaatttagaatgatgtcaaaggatgaaagaaagcaatacgatttatgtgactttcctgccgaatttagagatggatatgtagcatcttcactagtgggaatcaatcacaattctggacccagagctattcttggatgtgctcaagctaaacaagctatctcttgtctgagttcggatatacgaaataaaatagacaatggaattcatttgatgtatccagagaggccaatcgtgattagtaaggctttagaaacttcaaagattgcggctaattgcttcggccaacatgttactatagcattaatgtcgtacaaaggtatcaatcaagaggatggaattatcatcaaaaaacaatttattcagagaggcggtctcgatatagttaccgcaaagaaacatcaagtagaaattccattggaaaactttaataacaaagaaagagataggtctaacgcctattcaaaattagaaagtaatggattagttagactgaatgctttcttggaatccggagacgctatggcacgaaatatctcatcaagaactcttgaagatgattttgctagagataatcagattagcttcgatgtttccgagaaatataccgatatgtacaaatctcgcgttgaacgagtacaagtagaacttactgacaaagttaaggtacgagtattaaccatgaaagaaagaagacccattctaggagacaaatttaccactagaacgagtcaaaagggaacagtcgcgtatgtcgcggatgaaacggaacttccatacgacgaaaatggtatcacaccagatgtcattattaattctacatccatcttctctagaaaaactatatctatgttgatagaagttattttaacagccgcatattctgctaagccgtacaacaataagggagaaaaccgacctgtctgttttcctagtagtaacgaaacatccatcgatacatatatgcaattcgctaaacaatgttatgagcattcaaatccgaaattgtccgatgaagaattatcggataaaatcttttgtgaaaagattctctatgatcctgaaacggataagccttatgcatccaaagtattttttggaccaatttattacttgcgtctgaggcatttaactcaggacaaggcaaccgttagatgtagaggtaaaaagacgaagctcattagacaggcgaatgagggacgaaaacgtggaggaggtatcaagttcggagaaatggagagagactgtttaatagcgcatggtgcagccaatactattacagaagttttgaaagattcggaagaagattatcaagatgtgtatgtttgtgaaaattgtggagacatagcagcacaaatcaagggtattaatacatgtcttagatgttcaaaacttaatctctctcctctcttaacaaaaattgataccacgcacgtatctaaagtatttcttactcaaatgaacgccagaggcgtaaaagtcaaattagatttcgaacgaaggcctccttcgttttataaaccattagataaagttgatctcaagccgtcttttctggtgtaatattctagtttggtagtagatacatatcaatatcatcaaattcgagatccgaattataaaatgggcgtggattgttaactatagaatcggacgtctgatattcgaaaatctgtggagtttcaggttttggtggaggtgtaactgctacttgggatactgaagtctgatattcagaaagctgtggatgttctggttcggcatccaccgatggtgtcacatcactaatcggttcggtaacgtctgtggatggaggtgctacttctacagaacctgtagcctcagttgtcaacggagatacatttttaatgcgagaaaatgtataatttggtaatggtttcttatgtggatctgaagaagaggtaagatatctactagaaagataccgatcacgttctagttctcttttgtagaacttaactttttctttctccgcatctagttgatattccaacctcttcacgttactacgttcagattccaattcacgttcgcatgggttacctccgcagtttttacgagcgatttcacgttcagccttcatgcgtctctccctctctctatcgagtttatcagagcagtctttctgaaggcgatcgaactccataaatttctccaacgctttgattgtttccatagatttccgaagttcagcttttaggactgtgattctttttctttcgaattcacagctggatgtacaaccgtttccattaccgccatctctaagtttcttttctagatcggcaacatttcatccccatgccttttacattcctcgagtctactgtcgtcgaaatatcgttccagctccttttcgacatcaataactttagcacgttgtctctcaagctctcttttgtagttatctgattccctggcacgtttaagatcttcatgcaattgagtcagctcttaacttcctctcttgcttcttcgtcatagtacgcgcaatcactgtgagatccattgttaccacgtctacactcggcgagctcgcgtttaagagattcaatttcccgtttgtattggtccatgtttccattgctaccaccattagatttacaggctgctagttgtcgttcgagatcagaaatacgggttttcttggaattgatttcgtcgatgtacttggcatcgaaacacttattaagttctttttccaattctacgattttatttctttcgcgagtcaattccctcctgtagtaactatctgttttgtcagattcacgctctctacgtagactttcttgcaagttactaatttgttccctagcacgtccgagtttagttttatatgctgaatagagttctgattcatcctttgagcagatctctagcgatcgtttaagattcctaattctagtctttagcctatttacctcctcagaagatgttccgttaccgttgcgtttacactcgttaagctgtctatcaagatccatgattctatctctaagacgttgcatctctctttccatatcagcattgctttcattattacgtctgcagtcactcaactgtctttcaatatctgagattctatctctaagacgtcgcatctctctctgtttcggcattggtttcattattacgtctacagtcgttcaactgtctttcaagatctgatattctagattggagtctgctaatctctgtagcattttcacggcattcactcagttgtctttcaagatctgaaattttagattggagtctgctaatctctgtaagatttcctcctccgctctcgatgcagtcggtcaacttattctctagttctctaatacgcgaacgcagtgcatcaacttcttgcgtgtcttcctggttgcgtgtacattcatcgagtctagattcgagatctctaacgcgtcgtcgttcttcctcaagttctctgcgtactacagaaagcgtgtccctatcttgttgatatttagcaatttctgattctagagtactgattttgcttacgtagttactaatatttgtcttggccttatcaagatcctccttgtatttgtcgcattccttgatatccctacgaagtctggacagttcccattcgacattacgacgtttatcgatttcagctcggagatcgtcatcgcgttgttttagccacatacgactgagttcaagttctcgttgacaagatccatctacttttccattcctaatagtatccagttccttttctagttctgaacgcatttctcgttccctatcaagcgattctctcaattctcggatagtcttcttatcaatttctaataaatctgaaccatcatctgtcccattttgaatatccctgtgttctttgatctcttttgtaagtcggtcgattctttcggttttataaacagaatccctttccaaagtcctaatcttactgagtttatcactaagttctgcattcaattcggtgagttttctcttggcttcttccaactctgttttaaactctccactatttccgcattcttcctcgcatttatctaaccattcaattagtttattaataactagttggtaatcagcgattcctatagccgttcttgtaattgtgggaacataattaggatcttctaatggattgtatggcttgatagcatcatctttatcattattagggggatggacaaccttaattggttggtcctcatctcctccagtagcgtgtggttcttcaataccagtgttagtaataggcttaggcaaatgcttgtcgtacgcgggcacttcctcatccatcaagtatttataatcgggttctacttcagaatattcttttctaagagacgcgacttcgggagttagtagaagaactctgtttctgtatctatcaacgctggaatcaatactcaagttaaggatagcgaatacctcatcgtcatcatccgtatcttctgaaacaccatcatatgacatttcatgaagtctaacgtattgataaatagaatcagatttagtattaaacagatccttaacctttttagtaaacgcatatgtatattttagatctccagatttcataatatgatcacatgccttaaatgtcagtgcttccatgatataatctggaacactaatgggtgacgaaaaagatacagcaccatatgctacgttgataaataaatctgaaccactaagtagataatgattaatgttaagaaagaggaaatattcagtgtataggtatgtcttggcgtcatatcttgtactaaacacgctaaacagtttgttaatgtgatcaatttccaatagattaattagagcagcgggaataccaacaaacatattaccacatccgtattttctatgaatatcacatatcatgttaaaaaatcttgatagaagagcgaatatctcgtctgacttaatgagtcgtagttcagcagcaacataagtcataactgtaaatagaacatactttcctgtagtgttgattctagactccacatcaacaccattattaaaaatagttttatatacatctttaatctgctctccgttaatcgtcgaacgttctagtatacggaaacactttgatttcttatctgtagttaatgacttagtgatatcacgaagaatattacgaattacatttcttgtttttcttgagagacctgattcagaactcaactcatcgttccatagtttttctacctcagtggcgaaatctttggagtgcttggtacatttttcaataaggttcgtgacctccatttattataaaaaatttattcaaaacttaactacaatcgggtaattataaaatcgtagatctcccatgtggcggaatactaccatctatcgcatgtggatggacagtaggtaatggccatgggaacagtaatgtttgcatatttatctttcttgccagtattactgcatattgtcccaatgtttcgatgtgatgttctaacctatcaactgccgctgtatcacaacaatagtgtccgatgaaattaagattatgatccaatgtgtttaatatatgattatcaagtcttatacgatccgcgtcttttttgacaggatcaggttcttctacaggaagaagtttcggcctcttatgatattcatgtctgggaaacggtggtctagggtgaggctccggtatcggagtgggttttggattataatcatcatcgtctatgacatcatcttcgacttcgatatttattttgctatcttgatgatgtcctgtatcagttgcattttcagcactcgactgaatattagcgcattcattgtctattattaccatatttctaaacccaaaatgtatgtgttgaacatcagtactatcgttgatgagtcttatagcatgaattcgcttatcgttatcgggtttatcttctgtcaccttagcaattccttttttattaaactctacataatcatatccatttctattgtttgttctaatataaacgagtatagcatcattgctaaatttttcaatagtatcaaaaacagaatatcctaaaccatataatatatattcaggaacactcaaactaaatgtccaggattctcctaaatacgtaaactttaatagtgcgaaatcattcaaaaatctaccacttatagatagatagtacataaatgcgtatagtagtctacctatctctttattatgaaaaccggcattacgatcatatatgtcgtgatatacctgtgatccgtttacgttaaaccataaatacatgggtgatcctataaacatgaatttatttctaattctcagagctatagttaattgaccgtgtaatatttgcttacatgcatacttgatacgcttattaataagatttttatcattgctcgttatttcagaatcgtatatataaggagtaccatcgtgattcttaccagatattatacaaaatactatatataaaatatattgaccaacgttagtaatcatataaatgtttaacgttttaaattttgtattcaatgatccattatcatacgctagcatggtcttatgatattcattctttaaaatataatattgtgttagccattgcattggggctcctaatggagattttttattctcatccattttaggataggctttcataaagtccctaataacttcgtgaataatgtttctatgttttctactgatgcatgtatttgcttcgatttttttatcccatgtttcatctatcatagatttaaacgcagtaatgctcgcaacattaacatcttgaaccgttggtacaattccgttccataaatttataatgttcgccatttatataactcattttttgaatatacttttaattaacaaaagagttaagttactcatatggacgccgtccagtctgaacatcaatctttttagccagagatatcatagccgctcttagagtttcagcgtgattttccaacctaaatagaacttcatcgttgcgtttacaacacttttctatttgttcaaactttgttgttacattagtaatctttttttccaaattagttagccgttgtttgagagtttcctcattgtcgtctccatcggctttaacaattgcttcgcgtttagcctctggctttttagcagcctttgtagaaaaaaattcagttgctggaattgcaagatcgtcatctccggggaaaagagttccgtccatttaaagtacagattttagaaactgacactctgcgttatttatatttggtacaacacatggattataaatattgatgttaataacatcagaaaatgtaaagtctatacattgttgcatcgtgttaaattttctaatggatctagtattattgggtccaacttctgcctgaaatccaaatatggaagcggatacaaaaccgtttcctggataaaccacacatctccacttttgctttacatcagaaattgtgtcgttgacatcttgaactctcctatctaatgccggtgttccacctatagattttgaatattcgaatgctgcatgagtagcattaaattccttaatattgccataattttcatatattgagtaaccctggataaaaagtaaacacaccgcagccgtcgctaccacaataaaaaaaattgatagagagttcatttataatctattagaagctgacaaaatttttttacacgcatcagacaatgctttaataaatagttcaacatctacttttgtcatatcgaaccgatggtatgattctaacctagaattacatccgaaaaagttgactatgttcatagtcattaagtcattaacaaacaacattccagactctggattataagacgatactgtttcgtcacaattacctaccttaatcatgtgattatgaatattggctattagagcaccttctaagaaatctataatatctttgaaacacgatttaaaatcaaaccacgaatatacttctacgaagaaagttagtttacccataggagaaataactataaatggagatctaaatacaaaatccggatctatgatagttttaacattattatattctctattaaatacctccacatctaaaaatgttaattttgaaactatgtcttcgtttattaccgtacctgaactaaacgctataagctctattgtttgagaactctttaaacgatattcttgaaatacatgtaacaaagtttcctttaactcggtcggtttatctaccatagttacagaatttgtatccttatctataatataataatcaaaatcgtataaagttatataattatcgcgttcagattgggatcttttcaaatagactaaaaaccccatttctctagtaagtatcttatgtatatgtttgtaaaatatcttcatggtgggaatatgctctaccgcagttagccattcctcattgacagcggtagatgtattagacaaaactattccaatgtttaacaagggccattttacgagattattaaatccttgtttgataaatgtagccaatgagggttcgagttcaacgacgattgaattctcttcccgcggatgctgcatgatgaacgacgggatgttgttcgattgatttggaattctttttcgactttttgtttatattaaatattttaaaatttatagcggatagcaattcatgtaccacggataatgtagacgcgtattgcgcatcgatatctttattattagataaatttatcaataaatgtgagaagtttgcctcgttaaggtcttccatttaaatattatataaacatttgtgtttgtaacttattcgtcttttatggaatagttttttactagtaaagctgcaattacacactttgtccgtaaaacataaatataaacaccagcttttatcaatcgttccaaaaagtcgacggcggacatttttaacatggcatctattttaaatacacttaggtttttggaaaaaacatcattttataattgtaacgattcaataactaaagaaaagattaagattaaacataagggaatgtcatttgtattttataagccaaagcattctaccgttgttaaatacttgtctggaggaggtatatatcatgatgatttggttgtattggggaaggtaacaattaataatctaaagatgatgctattttacatggatttatcatatcatggagtgacaagtagtggagcaatttacaaattgggatcgtctatcgatagactttctctaaataggactattgttacaaaagttaataattatgatgatacattttttgacgacgatgattgatcgctattgcacaattttgtttttgtactttctaatatagtgtttaggttctttttcatatgagaatattgatttactaaaatatctatgtttaacttttgttctatgacgtccttatcggcggtatcggtacatatacgtaattcaccttcacaaaatacggagtcttcgataataatagccaatcgattattggatctagctgtctgtatcatattcaacatgtttaatatatcctttcgtttcccctttacaggcatcgatcgtagcatattttccgcgtctgatatggaaatgttaaaactacaaaaatgcgtaatgttagcccgtcctaatattggtacgtgtctataagtttggcatagtagaataatagacgtgtttaaatgccttccaaagtttaagaattctattagagtattgcattttgatagtttatcgcctacatcatcaaaaataagtaaaaagtgtgctgattttttatgattttgtgcgacagcaatacatttttctatgttacttttagttcgtatcagattatattctagagattcctgactactaacgaaattaatatgatttggccaaatgtatccatcataatctgggttataaacgggtgtaaacaagaatatatgtttatattttttaactagtgtagaaaacagagatagtaaatagatagtttttccagatccagatcctcctgttaaaaccattctaaacggcatttttaataaattttctcttgaaaattgtttttcttggaaacaattcataattatatttacagttactaaattaatttgataataaatcaaaatatggaaaactaaggttgttagtagggaggagaacaaagaaggcacatcgtgatataaataacatttattatcatgatgacaccagaaaacgacgaagagcagacatctgtgttctccgctactgtttacggagacaaaattcagggaaagaataaacgcaaacgcgtgattggtctatgtattagaatatctatggttatttcactactatctatgattaccatgtccgcgtttctcatagtgcgcctaaatcaatgcatgtctgctaacgaggctgctattactgacgccgctgttgccgttgctgctgcatcatctactcatagaaaggttgcgtctagcactacgcaatatgatcacaaagaaagctgtaatggtttatattaccagggttcttgttatatattacattcagactaccagttattctcggatgctaaagcaaattgcactgcggaatcatcaacactacccaataaatccgatgtcttgactacctggctcattgattatgttgaggatacatggggatctgatggtaatccaattacaaaaactacatccgattatcaagattctgatgtatcacaagaagttagaaagtatttttgtgttaaaacaatgaactaatatttatttttgtacattaataaatgaaatcgcttaatagacaaactgtaagtaggtttaagaagttgtcggtgccggccgctataatgatgatactctcaaccattattagtggcataggaacatttctgcattacaaagaagaactgatgcctagtgcttgcgccaatggatggatacaatacgataaacattgttatttagatactaacattaaaatgtctacagataatgcggtttatcagtgtcgtaaattacgagctagattgcctagacctgatactagacatctgagagtattgtttagtattttttataaagattattgggtaagtttaaaaaagaccaatgataaatggttagatattaataatgataaagatatagatattagtaaattaacaaattttaaacaactaaacagtacgacggatgctgaagcgtgttatatatacaagtctggaaaactggttaaaacagtatgtaaaagtactcaatctgtactatgtgttaaaaaattctacaagtgacaacaaaaaatgaattaataataagtcgttaacgtacgccgccatggacgccgcgtttgttattactccaatgggtgtgttgactataacagatacattgtatgatgatctcgatatctcaatcatggactttataggaccatacattataggtaacataaaaactgtccaaatagatgtacgggatataaaatattccgacatgcaaaaatgctactttagctataagggtaaaatagttcctcaggattctaatgatttggctagattcaacatttatagcatttgtgccgcatacagatcaaaaaataccatcatcatagcatgcgactatgatatcatgttagatatagaagataaacatcagccattttatctattcccatctattgatgtttttaacgctacaatcatagaagcgtataacctgtatacagctggagattatcatctaatcatcaatccttcagataatctgaaaatgaaattgtcgtttaattcttcattctgcatatcagacggcaatggatggatcataattgatgggaaatgcaatagtaattttttatcataaaagttgtaaagtaaataataaaacaataaatattgaactagtagtacgtatattgagcaatcagaaatgatgctggtacctcttatcacggtgaccgtagttgcgggaacaatattagtatgttatatattatatatttgtaggaaaaagatacgtactgtctataatgacaataaaattatcatgacaaaattaaaaaagataaagagttctaattccagcaaatctagtaaatcaactgatagcgaatcagactgggaggatcactgtagtgctatggaacaaaacaatgacgtagataatatttctaggaatgagatattggacgatgatagcttcgctggtagtttaatatgggataacgaatccaatgttatggcgcctagcacagaacacatttacgatagtgttgctggaagcacgctgctaataaataatgatcgtaatgaacagactatttatcagaacactacagtagtaattaatgaaacggagactgttgaagtacttaatgaagataccaaacagaatcctaactattcatccaatcctttcgtaaattataataaaaccagtatttgtagcaagtcaaatccgtttattacagaacttaacaataaatttagtgagaataatccgtttagacgagcacatagcgatgattatcttaataagcaagaacaagatcatgaacacgatgatatagaatcatcggtcgtatcattggtgtgattagtttcctttttataaaattgaagtaatatttagtattattgctgccgtcacgttgtacaaatggagatattccctgtattcggcatttctaaaattagcaattttattgctaataatgactgtagatattatatagatacagaacatcaaaaaattatatctgatgagatcaatagacagatggatgaaacggtacttcttaccaacatcttaagcgtagaagttgtaaatgacaatgagatgtaccatcttattcctcatagattatcgacgattatactctgtattagttctgtcggaggatgtgttatctctatagataatgacgtcaatggcaaaaatattctaacctttcccattgatcatgctgtaatcatatccccactgagtaaatgtgtcgtagttagcaagggtcctacaaccatattggttgttaaagcggatatacctagcaaacgattggtaacatcgtttacaaacgacatactatatgtaaacaatctgtcactgattaattatttgccgttgtctgtattcattattagacgagtcaccgactatttggatagacacatatgcgatcagatatttgctaataataagtggtattcccttataaccatcgacgataagcaatatcctattccatcaaactgtataggtatgtcctctgccaagtacataaattctagcatcgagcaagatactttaatccatgtttgtaacctcgagcatccgttcgactcagtatacaaaaaaatgcagtcgtacaattctctacctatcaaggaacaaatattgtacggtagaattgataatataaatatgagcattagtatttctgtggattaatagatttctagtatggggatcattaatcatctctaatctctaaatacctcataaaacgaaaaaaaagctattatcaaatactgtacggaatggattcattctcttctctttttatgaaactctgttgtatatctactgataaaactggaagcaaaaaatctgatagaaagaataagaataagatcaaggattatatggaacacgattattataaaataacaatagttcctggttcctcttccacgtctactagctcgtggtattatacacatgcctagtaatagtctctttgcgttgacggaaagcagactagaaataacaggctaaaatgttcagacaccataatagttcccaacccagataataacagagttccatcaacacattcctttaaactcaatcccaaacccaaaaccgttaaaatgtatccggccaattgatagtagataatgaggtgtacagcgcatgataatttacacagtaaccaaaatgaaaacactttagtaattataagaaatatagacggtaatgtcatcatcaacaatccgataatatgcctgagagtaaacattgatggataaaacaaaaatgctccgcataactctatcatggcaataacacaaccaaacacttgtaaaattcctaaattagtagaaaatacaacgaatatcgatgtataagtgatctcgagaaataataagaataaagtaatgcccgtaaagataaacatcaacattgtttggtaatcattaaaccaattagtatgaagttgaactaatttcacagtagattttattccagtgttatcctcgcatgtataagtacctggtaagatatctttatattccataatcaatgagacatcactatctgataacgaatgaagtctagcactagtatgccatttacttaatattgtcgtcttggaagttttattataagttaaaatatcatggttatccaatttccatctaatatactttgtcggattatctatagtacacggaataatgatggtatcattacatgctgtatactctatggtctttgtagttgttataacaaccaacgtatagaggtatatcaacgatattctaactcttgacattttttatttatttaaaatgatacctttgttatttattttattctattttgctaacggtattgaatggcataagtttgaaacgagtgaagaaataatttctacttacttattagacgacgtattatacacgggtgttaatggggcggtatacacattttcaaataataaactaaacaaaactggtttaactaataataattatataacaacatctataaaagtagaggatgcggataaggatacattagtatgcggaaccaataacggaaatcccaaatgttggaaaatagacggttcagacgacccaaaacatagaggtagaggatacgctccttatcaaaatagcaaagtaacgataatcagtcacaacggatgtgtactatctgacataaacatatcaaaagaaggaattaaacgatggagaagatttgacggaccatgtggttatgatttattcacggcggataacgtaattccaaaagatggtttacgaggagcattcgtcgataaagacggtacttatgacaaagtttacattcttttcactgatactatcggctcaaagagaattgtcaaaattccgtatatagcacaaatgtgcctaaacgacgaaggtggtccatcatcattgtctagtcatagatggtcgacgtttctcaaagtcgaattagaatgtgatatcgacggaagaagttatagacaaattattcattctagaactataaaaacagataatgatacgatactatatgtattcttcgatagtccttattccaagtccgcattatgtacctattctatgaataccattaaacaatctttttctacgtcaaaattggaaggatatacaaagcaattgccgtctccagctcctggtatatgtttaccagctggaaaagttgttccacataccacgtttgaagtcatagaacaatataatgtactagatgatattataaagcctttatctaaccaacctatcttcgaaggaccgtctggtgttaaatggttcgatataaaggagaaggaaaatgaacatcgggaatatagaatatacttcataaaagaaaattctatatattcgttcgatacaaaatctaaacaaactcgtagctcgcaagtcgatgcgcgactattttcagtaatggtaactgcgaaaccgttatttatagcagatatagggataggagtaggaatgccacaaatgaaaaaaatacttaaaatgtaatcttaatcgagtacaccacacgacaatgaacaaacataagacagattatgctggttatgcttgctgcgtaatatgcggtctaattgtcggaattatttttacagcgacactattaaaagttgtagaacgtaaattagttcatacaccattaatagataaaacgataaaagatgcatatattagagaagattgtcctactgactggataagctataataataaatgtatccatttatctactgatcgaaaaacctgggaggaaggacgtaatgcatgcaaagctctaaattcaaattcggatctaattaagatagagactccaaacgagttaagttttttaagaagccttagacgaggctattgggtaggagaatccgaaatattaaaccagacaaccccatataattttatagctaagaatgccacgaagaatggaactaaaaaacggaaatatatttgtagcacaacgaatactcccaaactgcattcgtgttacactatataacaattacactacatttttatcataccactacttcggttagatgttttagaaaaaaataaatatcgccgtaccgttcttgtttttataaaaataacaattaacaattatcaaattttttctttaatattttacgtggttgaccattcttggtggtaaaataatctcttagtgttggaatggaatgctgtttaatgtttccacactcatcgtatattttgacgtatgtagtcacatcgtttacgcaatagtcagactgtagttctatcatgcttcctacatcagaaggaggaacagttttaaagtctcttggttttaatctattaccgttagttttcatgaaatcctttgttttatccacttcacattttaaataaatgtccactatacattcttttgttaattttactagatcgtcatgggtcatagaatttataggttccgtagtccatggatccaaactagcaaacttcgcgtatacggtatcgcgattagtgtatacaccaactgtatgaaaattaagaaaacagtttaataaatcaacagaaatatttaatcctccgtttgatacagatgcgccatatttatggatttcggattcacacgttgtttgtctgaggtgttcgtctagtgttgcttctacgtaaacttcgattcccatatattctttattgtcagaatcgcataccgatttatcatcatacactgtttgaaaactaaatggtatacacatcaaaataataaataataacgagtacattctgcaatattgttatcgtaattggaaaaatagtgttcgagtgagttggattatgtgagtattggattgtatattttattttatattttgtaataagaataaaatgctaatgtcaagtttattccaatagatgtcttattaaaaacatatataataaataacaatggctgaatggcataaaattatcgaggatatctcaaaaaataataagttcgaggatgccgccatcgttgattacaagactacaaagaatgttctagctgctattcctaacagaacatttgccaagattaatccgggtgaaattattcctctcatcactaatcgtaatattctaaaacctcttattggtcagaaatattgtattgtatatactaactctctaatggatgagaacacgtatgctatggagttgcttactgggtacgcccctgtatctccgatcgttatagcgagaactcataccgcacttatatttttgatgggtaagccaacaacatccagacgtgacgtgtatagaacgtgtagagatcacgctacccgtgtacgtgcaactggtaattaaaataaaaagtaatattcatatgtagtgtcaattttaaatgatgatgatgaaatggataatatccatattgacgatgtcaataatgccggtattggcatacagttcatcgatttttagatttcattcagaggatgtggaattatgttatgggcatttgtattttgataggatctataatgtagtaaatataaaatataatccgcatattccatatagatataattttattaatcgcacgttaaccgtagatgaactagacgataatgtcttttttacacatggttattttttaaaacacaaatatggttcacttaatcctagtttgattgtctcattatcaggaaacttaaaatataatgatatacaatgctcagtaaatgtatcgtgtctcattaaaaatttggcaacgagtacatctactatattaacatctaaacataagacttattctctacatcggtccacgtgtattactataataggatacgattctattatatggtataaagatataaatgacaagtataatgacatctatgattttactgcaatatgtatgctaatagcgtctacattgatagtgaccatatacgtgtttaaaaaaataaaaatgaactcttaattatgctatgctattagaaatggataaaatcaaaattacggttgattcaaaaattggtaatgttgttaccatatcgtataacttggaaaagataactattgatgtcacacctaaaaagaaaaaagaaaaggatgtattattagcgcaatcagttgctgtcgaagaggcaaaagatgtcaaggtagaagaaaaaaatattatcgatattgaagatgacgatgatatggatgtagaaagcgcgtaatacgatctataaaaataagtatataaatactttttatttactgtactcttactgtgtagtggtgataccctactcgattatttttttaaaaaaaaaatacttattctgattcttctagccatttccgtgttcgtttgaatgccacatcgacgtcaaagataggggagtagttgaaatctagttctgcattgttggtacgcacctcaaatgtagtgttggatatcttcaacgtatagttgttgagtagtgatggttttctaaatagaattctcttcatatcattcttgcacgcgtacatttttagcatccatcttggaatcctagatccttgttctattcccaatggtttcatcaatagaagattaaacatatcgtacgaacacgatggagagtaatcgtagcaaaagtaagcatttcctttaatctcagatcccggatactggatatattttgcagccaacacgtgcatccatgcaacatttcctacatatacccggctatgcaccgcgtcatcatcgactgtacgatacataatgttaccgtgttgcttacattgctcgtaaaagactttcatcaatttgtctccttctccgtaaattccagtgggtcttaggcaacaagtatacaattttgctccattcatgattacggaattattggctttcataaccagttgctcggccatacgtttactttttgcgtatacatgtcctggtgatatatcataaagggtatgctcatggccgatgaatggatcaccgtgtttattgggtcctattgcttccatgctactagtatagatcaaatacttgattcctaggtccacacaagctgccaaaatagtctgtgttccataatagtttactttcatgatttcattatcggtgtattttccaaatacatccactagagcagccgtatgaataatcagatttaccccatctagcgcttctctcaccttatcaaagtcgtttatatcacattgtatatagtttataaccttaactttcgaggttattggttgtggatcttctacaatatctatgactctgatttcttgaacatcatctgcactaattaacagttttactatatacctgcctagaaatccggcaccaccagtaaccgcgtacacggccattgctgccactcataatatcagactacttattctattttactaaataatggctgtttgtataatagaccacgataatatcagaggagttatttactttgaaccagtccatggaaaagataaagttttaggatcagttattggattaaaatccggaacgtatagtttgataattcatcgttacggagatattagtcaaggatgtgattccataggcagtccagaaatatttatcggtaacatctttgtaaacagatatggtgtagcatatgtttatttagatacagatgtaaatatatttacaattattggaaaggcgttatctatttcaaaaaatgatcagagattagcgtgtggagttattggtatttcttacataaatgaaaagataatacattttcttacaattaacgagaatggcgtttgatatatcagttaatgcgtctaaaacaataaatgcattagtttacttttctactcagcaaaataaattagtcatacgtaatgaagttaatgatacacactacactgtcgaatttgatagggacaaagtagttgacacgtttatttcatataatagacataatgacaccatagaaataagaggggtgcttccagaggaaactaatattggttgcgcggttaatacgccggttagtatgacttacttgtataataagtatagttttaaactgattttagcagaatatataagacacagaaatactatatccggcaatatttattcggcattgatgacactagatgatttggctattaaacagtatggagacattgatctattatttaatgagaaacttaaagtagactccgattcgggactatttgactttgtcaactttgtaaaggatatgatatgttgtgattctagaatagtagtagctctatctagtctagtatctaaacattgggaattgacaaataaaaaatataggtgtatggcattagccgaacatatatctgatagtattccaatatctgagctatctagactacgatacaatctatgtaagtatctacgcgggcacactgagagcatagaggatgaatttgattattttgaagacgatgattcgtctacatgttctgccgtaaccgacagggaaacggatgtataatttttttttatagcgtgaaggatatgataaaaaatataattgttgtatttatcccattccaatcaccttatatgattctgtaacacaataaaggagtcttatagatgtatagaggtcagatactggtttgataaactgtttattccacataagtatgtttgactttatggttagacccgcatactttaacaaatcactgaaaattggagttaggtattgacctctcagaatcagttgccgttctggaacattaaatgtattttttatgatatactccaacgcatttatgtgggcatacaacaagtcattactaatggagtattccaagagttttagttgtctagtatttaacaagagaagagatttcaacagactgtttatgaactcgaatgccgcctcattgtcgcttatattgatgatgtcgaattctcccaatatcatcaccgatgagtagctcatcttgttatcgggatccaagttttctaaagatgtcattaaaccctcgatcatgaatggatttatcatcatcgtttttatgttggacatgagcttagtccgtttgtccacatctatagacgacgatttctgaattatttcatatatccctctctttaactccaggaacttgtcaggatggtctactttaatatgttctcgtctaagagatgaaaatctttggatggttgtacgcgacttttctctaaaggatgacgttgcccaagatcctctcttaaatgaatccatcttatccttggacaagatggacagtctattttccttagatggtttaatatttttgttacccatgatctataaaggtagacctaatcgtctcggatgacctatatatttattttcagttttattatacgcataaattgtaaaaaatatgttaggtttacaaaaatgtctcgtggggcattaatcgtttttgaaggattggacaaatctggaaaaacaacacaatgtatgaacatcatggaatctataccggcaaacacgataaaatatcttaactttcctcagagatccactgtcactggaaagatgatagatgactatctaactcgtaaaaaaacctataatgatcatatagttaatctattattttgtgcaaatagatgggagtttgcatcttttatacaagaacaactagaacagggaattactttaatagttgatagatacgcattttctggagtagcgtatgccgccgctaaaggcgcgtcaatgactctcagtaagagttatgaatctggattgcctaaacccgacttagttatattcttggaatctggtagcaaagaaattaatagaaacgtcggcgaggaaatttatgaagatgttacattccaacaaaaggtattacaagaatataaaaaaatgattgaagaaggagatattcattggcaaattatttcttctgaattcgaggaagatgtaaagaaggagttgattaagaatatagttatagaggctatacacacggttactggaccagtggggcaactgtggatgtaatagtgaaattacattttttataaatagatgttagtacagtgttataaatggatgaagcatattactctggcaacttggaatcagtactcggatacgtgtccgatatgcataccgaactcgcatcaatatctcaattagttattgccaagatagaaactatagataatgatatattaaacaaggacattgtaaattttatcatgtgtagatcaaacttggataatccatttatctctttcctagatactgtatatactattatagatcaagagaactatcagactgagttgattaattcattagacgacaatgaaattatcgattgtatagttaataagtttatgagcttttataaggataacctagaaaatatagtagatgctatcattactctaaaatatataatgaataatccagattttaaaactacgtatgcagaagtactcggttccagaatagccgatatagatattaaacaagtgatacgtaagaatatactacaattgtctaatgatatccgcgaacgatatttgtgaaaatattaaaaaaaaatactttttttattaaatgacgtcgcttcgcgaatttagaaaattatgctgtgatatatatcacgcatcaggatataaagaaaaatctaaattaattagagactttataacagatagggatgataaatatttgatcattaagctattgcttcccggattagacgatagaatttataacatgaacgataaacaaattataaaattatatagtataatatttaaacaatctcaggaagatatgctacaagatttaggatacggatatataggagacactattaggactttcttcaaagagaacacagaaatccgtccacgagataaaagcattttaactttagaagaagtggatagttttttaactacgttatcatccgtaactaaagaatcgcatcaaataaaattattgactgatatcgcatccgtttgtacatgtaatgatttaaaatgtgtagtcatgcttattgataaagatctaaaaattaaagcgggtcctcggtacgtacttaacgctattagtcctaatgcctatgatgtgtttagaaaatctaataacttgaaagagataatagaaaatgcatctaaacaaaatctagactctatatctatttctgttatgactccaattaatcccatgttagcggaatcgtgtgattctgtcaataaggcgtttaaaaaatttccatcaggaatgtttgcggaagtcaaatacgatggtgaaagagtacaagttcataaaaataataacgagtttgccttctttagtagaaacatgaaaccagtactctctcataaagtggattatctcaaagaatacataccgaaagcatttaaaaaagctacgtctatcgtattggattctgaaattgttcttgtagacgaacataatgtaccgctcccgtttggaagtttaggaatacacaaaaagaaagaatataaaaactctaacatgtgtttgttcgtgtttgactgtttgtactttgatggattcgatatgacggacattccattgtacgaacgaagatcttttctcaaagatgttatggttgaaatacccaatagaatagtattctcagagttgacgaatattagtaacgagtctcagttaactgacgtattggatgatgcactaacgagaaaattagaaggattggtcttaaaagatattaatggagtatacgaaccgggaaagagaagatggttaaaaataaagcgagactatttgaacgagggttccatggcagattctgccgatttagtagtactaggtgcttactatggtaaaggagcaaagggtggtatcatggcagtctttctaatgggttgttacgacgatgaatccggtaaatggaagacggttaccaagtgttcaggacacgatgataatacgttaagggagttgcaagaccaattaaagatgattaaaattaacaaggatcccaaaaaaattccagagtggttagtagttaataaaatctatattcccgattttgtagtagaggatccgaaacaatctcagatatgggaaatttcaggagcagagtttacatcttccaagtcccataccgcaaatggaatatccattagatttcctagatttactaggataagagaggataaaacgtggaaagaatctactcatctaaacgatttagtaaacttgactaaatcttaatagttacatacaaactgaaaattaaaataacactatttagttggtggtcgccatggatggtgttattgtatactgtctaaacgcgctagtaaaacatggcgaggaaataaatcatataaaaaatgatttcatgattaaaccatgttgtgaaagagtttgtgaaaaagtcaagaacgttcacattggcggacaatctaaaaacaatacagtgattgcagatttgccatatctggataatgcggtatccgatgtatgcaattcactgtataaaaagaatgtatcaagaatatccagatttgctaatttgataaagatagatgacgatgacaagactcctactggtgtatataattattttaaacctaaagatgccattcctgttattatatccataggaaaggatagagatgtttgtgaactattaatctcatcagacatatcgtgtgcatgcgtggagttaaattcatatcacgtagccattcttcccatggatgtttccttttttaccaaaggaaatgcatcattgattattctcctgtttgatttctctatcgatgcggcacctctcttaagaagtgtaaccgataataatgttattatatctagacaccagcgtatacatgacgagcttccgagttccaattggttcaagttttacataagtataaagtccgactattgttctatattatatatggttgttgatggatctgtgatgcatgcgatagctgataatagaactcacgcaattattagcaaaaatatattagacaatactacgattaacgatgagtgtagatgctgttattttgaaccacagattaggattcttgatagagatgagatgctcaatggatcatcgtgtgatatgaacagacattgtattatgatgaatttacctgatgtaggcgaatttggatctagtatgttggggaaatatgaacctgacatgattaagattgctctttcggtggctggtaatttaataagaaatcgagactacattcccgggagacgaggatatagctactacgtttacggtatagcctctagataatttttttaagcacgaaataaaaaacataattttaaaccaatctatttcatactattttgtgtgatcaccatggacataaagatagatattagtatttctggtgataaatttacggtgactactaggagggaaaatgaagaaagaaaaaaatatctacctctccaaaaagaaaaaactactgatgttatcaaacctgattatcttgagtacgatgacttgttagatagagatgagatgtttactattctagaggaatattttatgtacagaggtctattaggcctcagaataaaatatggacgactctttaacgaaattagaaaattcgacaatgatgcggaagaacaattcggtactatagaagaactcaagcagaaacttagattaaattctgaagagggagcagataactttatagattatataaaggtacaaaaacaggatatcgtcaaacttactgtatacgattgcatatctatgataggattgtgtgcatgcgtggtagatgtttggagaaatgagaaactgttttctagatggaaatattgtttacgagcgattaaactgtttattgatgatcacatgcttgataagataaaatctatactgcagaatagactagtatatgtggaaatgtcatagaaagttaaaagttaatgagagcaaaaatatataaggttgtattccatatttgttatttttttctgtaatagttagaaaaatacattcgatggtctatctatcagattattatgtgttataaggtactttttctcataataaactagagtatgagtaagatagtgtttttcaaaacatataaatctaaaattgatggatgagatatacagctattaatttcgaaaatatattttaatctgataactttaaacatggatttttgatggtggtttaacgttttaaaaaaagattttgttattgtagtatatgataatattaaaagatggatataaagaatttgctgactgcatgtactattttttacattactacattggctacggcagatatacctacttcgtcactgccacacgctccggtaaacggggcatgtgacgagggagaatatcttgataagaggcataatcaatgttgtaatcagtgtccacctggagaatttgccaaggtcagatgtagtggtagtgataacacaaaatgtgaacgctgcccacctcatacatataccgcaatccccaattactctaatggatgtcatcaatgtagaaaatgcccaacaggatcatttgataaggtaaagtgtaccggaacacagaacagtaaatgttcgtgtcttcctggttggtattgcgctactgattcttcacagactgaagattgtcgagattgtataccaaaaaggagatgtccatgcggatactttggtggaatagatgaacaaggaaatcctatttgtaaatcgtgttgtgttggtgaatattgcgactacctacgtaattatagacttgatccatttcctccatgcaaactatctaaatgtaattaattatgattttgatgataatgttaccatacattatatcgctacttggttagtgtattattcagtatgaagacctattaataattacttatcttttgacgatcttgttataattataatataaaaatacttatggcatagtaactcataattgctgacgcgataaattcgtaataatctgttttgttcaaaggaatctacaggcataaaaataaaaatataatttataatatactcttacagcgcgccatcatgaataacagcagtaaattaattgctgttattaatggatttagaaatagtggacgattttgtgatattaatatagttattaatgatgaaaggataaacgctcacagactcatcctatctggagcctccgaatatttttccattctgttttccaataattttatcgattctaatgaatacgaagttaatctaagtcatttagattatcaaagcgtaaacgatttgatcgattacatttatgggatacctttgagcctaactaacgataacgtgaaatatattctttcaaccgctgattttttacaaattggatctgctattacggagtgtgaaaattacatacttaaaaatctttgttctagaaactgtatcgatttctacatatacgctgataaatataataacaagaaaatagaatcagcgtcgtttaacacaatattacaaaatattttgagactcatcaacgatgaaaactttaaatacttaacagaggaatcaatgataaaaattttaagcgatgatatgttaaatataaaaaatgaggatttcgccccactaattctcattaaatggttagagagtactcaacaaccatgcaccgtcgagttacttaaatgcctcagaatatcattgctttccccacaagttataaaatcactttatagtcatcgactggttagttcaatctacgaatgtataacattcttaaacaatatagcattcttggatgaatcatttcctagataccatagcatcgagttgatatctatcggtataagtaattcgcatgataagatttccataaactgctacaatcataaaaaaaatacatgggaaatgatatcttcacgtagatataggtgtagtttcgcagtggccgtcctggataatattatttatatgatgggtggatatgatcagtccccgtatagaagttcaaaggttatagcgtacaatacatgtacaaattcttggatatatgatataccagagctaaaatatcctcgttctaattgtgggggactggctgatgacgaatacatttattgtataggcggcatacgcgatcaggattcatcgttgacatctagtattgatagatggaagccatcaaaaccatattggcagaagtatgctaaaatgcgcgaaccaaaatgtgatatgggggttgcgatgttaaacggattaatatatgttataggtggaatcgttaaaggtgacacgtgtaccgacgcactagagagtttatcagaagatggatggatgaagcatcaacgtcttccaataaaaatgtccaatatgtcgacgattgttcatgatggcaagatttatatatctggaggttacaacaatagtagtgtagttaatgtaatatcgaatttagtccttagctataattcgatatatgatgaatggaccaaattatcatcattaaacattcctagaattaatcccgctctatggtcagcgcataataaattatatgtaggaggaggaatatctgatgatgttcgaactaatacatctgaaacatacgacaaagaaaaagattgttggacattggataatggtcacgtgttaccacgcaattatataatgtataaatgcgaaccgattaaacataaatatccattggaaaaaacacagtacacgaatgattttctaaagtatttggaaagttttataggtagttgatagaacaaaatacataattttgtaaaaataaatcactttttatactaatatgacacgattaccaatacttttgttactaatatcattagtatacgctacaccttttcctcagacatctaaaaaaataggtgatgatgcaactctatcatgtaatcgaaataatacaaatgactacgttgttatgagtgcttggtataaggagcccaattccattattcttttagctgctaaaagcgacgtcttgtattttgataattataccaaggataaaatatcttacgactctccatacgatgatctagttacaactatcacaattaaatcattgactgctagagatgccggtacttatgtatgtgcattctttatgacatcgcctacaaatgacactgataaagtagattatgaagaatactccacagagttgattgtaaatacagatagtgaatcgactatagacataatactatctggatctacacattcaccggaaactagttctgagaaacctgattatatagataattctaattgctcgtcggtattcgaaatcgcgactccggaaccaattactgataatgtagaagatcatacagacaccgtcacatacactagtgatagcattaatacagtaagtgcatcatctggagaatccacaacagacgagactccggaaccaattactgataaagaagatcatacagttacagacactgtctcatacactacagtaagtacatcatctggaattgtcactactaaatcaaccaccgatgatacgtacaatgataatgatacagtaccaccaactactgtaggcggtagtacaacctctattagcaattataaaaccaaggactttgtagaaatatttggtattaccgcattaattatattgtcggccgtggcaatattctgtattacgtattatatatgtaataaacgttcacgtaaatacaaaacagagaacaaagtctagatttttgacttacataaatgtctgggatagtaaaatctatcatattgagcgggccatctggtttaggaaagacagccatagccaaaagactatgggaatatatttggatttgtggtgtcccataccactagatttcctcgtcctatggaacgagaaggtgtcgattaccattacgttaacagagaggccatctggaagggaatagccgccggaaactttctagaacatactgagtttttaggaaatatttacggaacttctaaaactgctgtgaatacagcggctattaataatcgtatttgtgtgatggatctaaacatcgatggcgttagaagtcttaaaaatacgtacctaatgccttactcggtgtatataagacctacctctcttaaaatggttgagaccaagcttcgttgtagaaacactgaagcggatgatgagattcatcgtcgtgtgatgttggcaaaaactgacatggatgaggcaggtgaagccggtctattcgacactattatcattgaagatgatgtgaatttagcatatagtaagttaattcagatactacaggaccgtattagaatgtattttaacactaattagagacttaagacttaaaacttgataattaataatataactcgtttttatatgtggctatttcaacgtctaatgtattagttaaatattaaaacttaccacgtaaaacttaaaatttaaaatgatatttcattgacagatagatcacacattatgaactttcaaggacttgtgttaactgacaattgcaaaaatcaatgggtcgttggaccattaataggaaaaggtggatttggtagtatttatactactaatgacaataattatgtagtaaaaatagagcccaaagctaacggatcattatttaccgaacaggcattttatactagagtacttaaaccatccgttatcgaagaatggaaaaaatctcacaatataaagcacgtaggtcttatcacgtgcaaggcatttggtctatacaaatccattaatgtggaatatcgattcttggtaattaatagattaggtgcagatctagatgcggtgatcagagccaataataatagattaccaaaaaggtcggtgatgttgatcggaatcgaaatcttaaataccatacaatttatgcacgagcaaggatattctcacggagatattaaagcgagtaatatagtcttggatcaaatagataagaataaattatatctagtggattacggattggtttctaaattcatgtctaatggcgaacatgttccatttataagaaatccaaataaaatggataacggtactctagaatttacacctatagattcgcataaaggatacgttgtatctagacgtggagatctagaaacacttggatattgtatgattagatggttgggaggtatcttgccatggactaagatatctgaaacaaagaattgtgcattagtaagtgccacaaaacagaaatatgttaacaatactgcgactttgttaatgaccagtttgcaatatgcacctagagaattgctgcaatatattaccatggtaaactctttgacatattttgaggaacccaattacgacaagtttcggcacatattaatgcagggtgtatattattaagtgtggtgtttggtcgataaaaattaaaaaataacttaatttattattgatctcgtgtgtacaaccgaaatcatggcgatgttttacgcacacgctctcggtgggtacgacgagaatcttcatgcctttcctggaatatcatcgactgttgccaatgatgtcaggaaatattctgttgtgttagtttataataacaagtatgacattgtaaaagacaaatatatgtggtgttacagtcaggtgaacaagagatatattggagcactgctgcctatgtttgagtgcaatgaatatctacaaattggagatccgatccatgatcaagaaggaaatcaaatctctatcatcacatatcgccacaaaaactactatgctctaagcggaatcgggtacgagagtctagacttgtgtttggaaggagtagggattcatcatcacgtacttgaaacaggaaacgctgtatatggaaaagttcaacatgattattctactatcaaagagaaggccaaagaaatgagtacacttagtccaggacctatcatcgattaccacgtctggataggagattgtatctgtcaagttactgctgtggacgtacatggaaaggaaattatgaaaatgagattcaaaaagggtgcggtgcttccgatcccaaatctggtaaaagttaaacttggggagaatgatacagaaaatctttcttctactatatcggcgacaccatcgaggtaaccacctctctggaagacagcgtgaataatgtactcatgaaacgtttggaaactatacgccatatgtggtctgttgtatatgatcattttgatattgtgaatggtaaagaatgctgttatgtgcatacgcatttgtctaatcaaaatcttataccgagtactgtaaaaacaaatttgtacatgaagactatgggatcatgcattcaaatggattccatggaagctctagagtatcttagcgaactgaaggaatcaggtggatggagtcccagaccagaaatgcaggaatttgaatatccagatggagtggaagacactgaatcaattgagagattggtagaggagttcttcaatagatcagaacttcaggctggtgaatcagtcaaatttggtaattctattaatgttaaacatacatctgtttcagctaagcaactaagaacacgtatacggcagcagcttccttctatactctcatcttttaccaacacaaagggtggatatttgttcattggagttgataataatacacacaaagtatttggattcacggtgggttacgactacctcagactgatagagaatgatatagaaaagcatatcaaaagactttgtgttgtgtatttctgtgagaagaaagaggacatcaagtacgcgtgtcgattcatcaaggtatataaacctggggatgaggctacctcgacatacgtgtgcgctatcaaagtggaaagatgctgttgtgctgtgtttgcagattggccagaatcatggtatatggatactaatggtatcaagaagtattctccagatgaatgggtgtcacatataaaattttaattaatgtaatagagaacaaataataaggttgtaatatcatatagacaataactaacaattaattagtaactgttatctcttttttaactaaccaactaactatatacctattaatacatcgtaattatagttcttaacatctattaatcattgattcgcttctttaattttttataaactaacattgttaattgaaaagggataacatgttacagaatataaattatatatggatttttttaaaaaggaaatacttgactggagtatatatttatctcttcattatatagcacgcgtgttttccaatttttccacatcccatataatacaggattataatctcgttcgaacatacgagaaagtggataaaacaatagttgattttttatctaggttgccaaatttattccatattttagaatatggggaaaatattctacatatttattctatggatgatgctaatacgaatattataattttttttctagatagagtattaaatattaataagaacgggtcatttatacacaatctcgggttatcatcatccattaatataaaagaatatgtatatcaattagttaataatgatcatccagataataggataagactaatgcttgaaaatggacgtagaacaagacattttttgtcctatatatcagatacagttaatatctatatatgtattttaataaatcatggattttatatagatgccgaagacagttacggttgtacattattacatagatgtatatatcactataagaaatcagaatcagaatcatacaatgaattaattaagatattgttaaataatggatcagatgtagataaaaaagatacgtacggaaacacaccttttatcctattatgtaaacacgatatcaacaacgtggaattgtttgagatatgtttagagaatgctaatatagactctgtagactttaatagatatacacctcttcattatgtctcatgtcgtaataaatatgattttgtaaagttattaatttctaaaggagcaaatgttaatgcgcgtaataaattcggaactactccattttattgtggaattatacacggtatctcgcttataaaactatatttggaatcagacacagagttagaaatagataatgaacatatagttcgtcatttaataatttttgatgctgttgaatctttagattatctattatccagaggagttattgatattaactatcgtactatatacaacgaaacatctatttacgacgctgtcagttataatgcgtataatacgttggtctatctattaaacaaaaatggtgattttgagacgattactactagtggatgtacatgtatttcggaagcagtcgcaaacaacaacaaaataataatggaagtactattgtctaaacgaccatctttgaaaattatgatacagtctatgatagcaattactaaacataaacagcataatgcagatttattgaaaatgtgtataaaatatactgcgtgtatgaccgattatgatactcttatagatgtacagtcgctacagcaatataaatggtatattttaagatgtttcgatgaaatagatatcatgaagagatgttatataaaaaataaaactgtattccaattagttttttgtatcaaagacattaatactttaatgagatacggtaaacatccttctttcgtgaaatgcactagtctcgacgtatacggaagtcgtgtacgtaatatcatagcatctattagatatcgtcagagattaattagtctattatccaagaagctggatcctggagataaatggtcgtgttttcctaacgaaataaaatataaaatattggaaaactttaacgataacgaactatccacatatctaaaaatcttataaacattattaaaatataaaatctaagtaggataaaatcacactacatcattgtttccttttagtgctcgacagtgtatactatttttaacgctcataaataaaaatgaaaacgatttccgttgttacgttgttatgcgtactacctgctgttgtttattcaacatgtactgtacccactatgaataacgctaaattaacgtctaccgaaacatcgtttaatgataaccagaaagttacgtttacatgtgatcagggatatcattctttggatccaaatgctgtctgtgaaacagataaatggaaatacgaaaatccatgcaaaaaaatgtgcacagtttctgattatgtctctgaactatataataaaccgctatacgaagtgaattccaccatgacactaagttgcaacggcgaaacaaaatattttcgttgcgaagaaaaaaatggaaatacttcttggaatgatactgttacgtgtcctaatgcggaatgtcaacctcttcaattagaacacggatcgtgtcaaccagttaaagaaaaatactcatttggggaatatatgactatcaactgtgatgttggatatgaggttattggtgcttcgtacataagttgtacagctaattcttggaatgttattccatcatgtcaacaaaaatgtgatatgccgtctctatctaacggattaatttccggatctacattttctatcggtggcgttatacatcttagttgtaaaagtggttttacactaacggggtctccatcatccacatgtatcgacggtaaatggaatcccatactcccaatatgtgtacgaactaacgaaaaatttgatccagtggatgatggtcccgacgatgagacagatttgagcaaactctcgaaagacgttgtacaatatgaacaagaaatagaatcgttagaagcaacttatcatataatcatagtggcgttgacaattatgggcgtcatatttttaatctccgttatagtattagtttgttcctgtgacaaaaataatgaccaatataagttccataaattgctaccgtaaatataaatccgttaaaataattaataatttaataacaaacaagtatcaaaagattaaagacttatagctagaatcaattgagatgtcttcttcagtggatgttgatatctacgatgccgttagagcatttttactcaggcactattataacaagagatttattgtgtatggaagaagtaacgccatattacataatatatacaggctatttacaagatgcgccgttataccgttcgatgatatagtacgtactatgccaaatgaatcacgtgttaaacaatgggtgatggatacacttaatggtataatgatgaatgaacgcgatattactgtaagcgttggcaccggaatactattcatggaaatgtttttcgattacaataaaaatagtatcaacaatcaactaatgtatgatataattaatagcgtatctataattctagctaatgagagatatagaagcgcttttaacgacgatggtatatacatccgtagaaatatgattaacaagttgtacggatacgcatctctaactactattggcacgatcgctggaggtgtttgttattatctgttgatgcatctagttagtttgtataaataattatttcaatatactagttaaaattttaagattttaaatgtataaaaaactaataacgtttttatttgtaataggtgcattagcatcctattcgaataatgagtacactccgtttaataaactgagtgtaaaactctatatagatggagtagataatatagaaaattcatatactgatgataataatgaattggtgttaaattttaaagagtacacaatttctattattacagagtcatgcgacgtcggatttgattccatagatatagatgttataaacgactataaaattattgatatgtataccattgactcgtctactattcaacgcagaggtcacacgtgtagaatatctaccaaattatcatgccattatgataagtacccttatattcacaaatatgatggtgatgagcgacaatattctattactgcagagggaaaatgctataaaggaataaaatatgaaataagtatgatcaacgatgatactctattgagaaaacatactcttaaaattggatctacttatatatttgatcgtcatggacatagtaatacatattattcaaaatatgatttttaaaaatttaaaatatattatcacttcagtgacagtagtcaaataacaaacaacaccatgagatatattataattctcgcagttttgttcattaatagtatacatgctaaaataactagttataagtttgaatccgtcaattttgattccaaaattgaatggactggggatggtctatacaatatatcccttaaaaattatggcatcaagacgtggcaaacaatgtatacaaatgtaccagaaggaacatacgacatatccgcatttccaaagaatgatttcgtatctttctgggttaaatttgaacaaggcgattataaagtggaagagtattgtacgggactatgcgtcgaagtaaaaattggaccaccgactgtaacattgactgaatacgacgaccatatcaatttgtacatcgagcatccgtatgctactagaggtagcaaaaagattcctatttacaaacgcggtgacatgtgtgatatctacttgttgtatacggctaacttcacattcggagattctaaagaaccagtaccatatgatatcgatgactacgattgcacgtctacaggttgcagcatagactttgtcacaacagaaaaagtgtgcgtgacagcacagggagccacagaagggtttctcgaaaaaattactccatggagttcgaaagtatgtctgacacctaaaaagagtgtatatacatgcgcaattagatccaaagaagatgttcccaatttcaaggacaaaatggccagagttatcaagagaaaatttaatacacagtctcaatcttatttaactaaatttctcggtagcacatcaaatgatgttaccacttttcttagcatgcttaacttgactaaatattcataactaatttttattaatgatacaaaaacgaaataaaactgcatattatacactggttaacgcccttataggctctaaccattttcaagatgaggtccctgattatagtccttctgttcccctctatcatctactccatgtctattagacgatgtgagaagactgaagaggaaacatggggattgaaaatagggttgtgtataattgccaaagatttctatcccgaaagaactgattgcagtgttcatctcccaactgcaagtgaaggattgataactgaaggcaatggattcagggatatacgaaacaccgataaattataaaaaaagcaatgtgtccgctgtttccgttaataatactattttcgtaactggcggattattcataaataactctaatagcacgatcgtggttaacaatatggaaaaacttgacatttataaagacaaacaatggtcgattatagaaatgcctatggctagggtatatcacggcatcgactcgacatttggaatgttatattttgccggaggtctatccgttaccgaacaatatggtaatttagagaaaaacaacgagatatcttgttacaatcctagaacgaataagtggtttgatatttcatatactatttataagatatccatatcatcattgtgtaaactaaataacgtcttctatgtatttagtaaggacattggatatgtggaaaagtatgatggtgcatggaagttagtacatgatcgtctccccgctataaaggcattatcaacttctccttattgattgaaaatgaaaatataaatagtttttatgtatagcagtattaccctatagttttattgcttactactaacatggatacagatgttacaaatgtagaagatatcataaatgaaatagatagagagaaagaagaaatactaaaaaatgtagaaattgaaaataataaaaacattaacaagaatcatccaagtggatatattagagaagcactcgttattaatactagtagtaatagtgattccattgataaagaagttatagaatgtatctgtcacgatgtaggaatatagatcatatctactaatttttataatcgatacaaaacataaaaaacaactcgttattacatagcaggcatggaatccttcaagtattgttttgataacgatggcaagaaatggattatcggaaatactttatattctggtaattcaatactctataaggtcagaaaaaatttcactagttcgttctacaattacgtaatgaagatagatcacaaatcacacaagccattgttgtctgaaatacgattctatatatctgtattggatcctttgactatcgacaactggacacgggaacgtggtataaagtatttggctattccagatctgtatggaattggagaaaccgatgattatatgttcttcgttataaagaattcgggaagagtattcgccccaaaggatactgaatcagtcttcgaagcatgcgtcactatgataaacacgttagagtttatacactctcaaggatttacccatggaaaaatagaaccgaggaatatactgattagaaataaacgtctttcactaattgactattctagaactaacaaactatacaagagtggaaactcacatatagattacaacgaggacatgataacttcaggaaatatcaattatatgtgtgtagacaatcatcttggagcaacagtttcaagacgaggagatttagaaatgttgggatattgcatgatagaatggttcggtggcaaacttccatggaaaaacgaaagtagtataaaagtaataaaacaaaaaaaagaatataaaaaatttatagctactttctttgaggactgttttcctgaaggaaatgaacctctggaattagttagatatatagaattagtatacacgttagattattctcaaactcctaattatgacagactacgtaaactgtttatacaagattgaaattatattcttttttttatagagtgtggtagtgttacggatatctaatattaatattagactatctctatcgcgctacacgaccaatatcgattactatggatatcttctatgaaaggagagaatgtatttatttctccagcgtcaatctcgtcagtattgacaatactgtattatggagctaatggatccactgctgaacagctatcaaaatatgtagaaacggaggagaacacggataaggttagcgctcagaatatctcattcaaatccatgaataaagtatatgggcgatattctgccgtgtttaaagattcctttttgagaaaaattggcgataagtttcaaactgttgacttcactgattgtcgcactatagatgcaatcaacaagtgtgtagatatctttactgaggggaaaatcaatccactattggatgaaccattgtctcctagcaattagtgccgtatactttaaagcaaaatggttgacgccattcgaaaaggaatttaccagtgattatcccttttacgtatctccgacggaaatggtagacgtaagtatgatgtctatgtacggcaaggcatttaatcacgcatctgtaaaagaatcattcggcaacttttcaatcatagaactgccatatgttggagatactagtatgatggtcattcttccagacaagattgatggattagaatccatagaacaaaatctaacagatacaaattttaagaaatggtgtgactttatggatgctatgtttatagatgttcacattcccaagtttaaggtaacaggctcgtataatctggtggatactctagtaaagtcaggactgacagaggtgttcggttcaactggagattatagcaatatgtgtaatttagatgtgagtgtcgacgctatgatccacaaaacgtatatagatgtcaatgaagagtatacagaagcagctgcagcaacttctgtactagtggcagactgtgcatcaacaattacaaatgagttctgtgcagatcatccgttcatctatgtgattaggcatgttgatggaaaaattcttttcgttggtagatattgctctccgacaactaattgttaaccattttttttaaaaaaaatagaaaaaacatgtggtattagtgcaggtcgttgttcttccaattgcaattggtaagatgacggccaactttagtacccacgtcttttcaccacagcactgtggatgtgacagactgaccagtattgatgacgtcaaacaatgtttgactgaatatatttattggtcgtcctatgcataccgcaacaggcaatgcgctggacaattgtattccacactcctctcttttagagatgatgcggaattagtgttcatcgacattcgcgagctggtaaaaaatatgccgtgggatgatgtcaaagattgtacagaaatcatccgttgttatataccggatgagcaaaaaaccatcagagagatttcggccatcatcggactttgtgcatatgctgctacttactggggaggtgaagaccatcccactagtaacagtctgaacgcattgtttgtgatgcttgagatgctaaattacgtggattataacatcatattccggcgtatgaattgatgagttgtacatcttgacattttctttcttctcttctccctttcttctcttctcccttcctccctcttctccctttcccagaaacaaacttttttacccactataaaataaaatgagtatactacctgttatatttctttctatatttttttattcttcattcgttcagacttttaacgcgtctgaatgtatcgacaaagggcaatattttgcatcattcatggagttagaaaacgagccagtaatcttaccatgtcctcaaataaatacgctatcatccggatataatatattagatattttatgggaaaaacgaggagcggataatgatagaattataccgatagataatggtagcaatatgctaattctgaacccgacacaatcagactctggtatttatatatgcattaccacgaacgaaacctactgtgacatgatgtcgttaaatttgacaatcgtgtctgtctcagaatcaaatatagattttatctcgtatccacaaatagtaaatgagagatctactggcgaaatggtatgtcccaatattaatgcatttattgctagtaacgtaaacgcagatattatatggagcggacatcgacgccttagaaataagagacttaaacaacggacacctggaattattaccatagaagatgttagaaaaaatgatgctggttattatacatgtgttttagaatatatatacggtggcaaaacatataacgtaaccagaattgtaaaattagaggtacgggataaaataataccttctactatgcaattaccagatggcattgtaacttcaataggtagtaatttgactattgcatcgttgagacctcccacaacggatgcagacgtcttttggataagtaatggtatgtattacgaagaagatgatggggacggaaacggtagaataagtgtagcaaataaaatctatatgaccgataagagacgtgttattacatcccggttaaacattaatcctgtcaaggaagaagatgctacaacgtttacgtgtatggcgtttactattcctagcatcagcaaaacagttactgttagtataacgtgaatgtatgttgttacatttccatgtcaattgagtttataagaatttttatacattatcttccaacaaacaattgacgaacgtattgctatgattaactcccacgatactatgcatattattaatcattaacttgcagactatacctagtgctattttgacatactcatgttcttgtgtaattgcggtatctatattattaaagtacgtaaatctagctatagttttattatttaattttagataatataccgtctccttatttttaaaaattgccacatcctttattaaatcatgaatgggaatttctatgtcatcgttagtatattgtgaacaacaagagcagatatctataggaaagggtggaatgcgatacattgatctatgtagttttaaaacacacgcgaactttgaagaatttatataaatcattccatcgatacatccttctatgttgagatgtatatatccaggaattcgtttattaatatcgggaaatgtataaactaaaacattgcccgaaagcggtgcctctatctgcgttatatccgttcttaacttacaaaatgtaaccaatacctttgcatgacttgttttgttcggcaacgttagtttaaacttgacgaatggattaattacaatagcatgatccgcgcatctattaagtttttttactttaacgcccttgtatgtttttacagagactttatctaaatttctagtgcttgtatgtgttataaatataacgggatatagaaccgaatcacctaccttagatacccaattacattttatcagatccagataataaacaaattttgtcgccctaactaattctatattgttatatattttacaattggttatgatatcatgtaataacttggagtctaacgcgcatcgtcgtacgtttatacaattgtgatttagtgtagtatatctacacatgtatttttccgcactatagtattctggactagtgataaaactatcgttatatctatcttcaatgaactcatcgagatattgctctctgtcatattcatacacctgcataaactttctagacatcttacaatccgtgttattttaggatcatatttacatatttacgggtatatcaaagatgttagattagttaatgggaatcgtctataataatgaatattaaacaattatatgaggacttttaccacaaagcatcataaaaatgagtcgtcgtctgatttatgttttaaatatcaaccgcaaatcaactcataaaatacaagagaatgaaatatatacatattttagtcattgcaatatagaccatacttctacagaacttgattttgtagttaaaaactatgatctaaacagacgacaacctgtaactgggtatactgcactacactgctatttgtataataattactttacaaacgatgtactgaagatattattaaatcatggagtggatgtaacgatgaaaaccagtagcggacgtatgcctgtttatatattgcttactagatgttgtaatatttcacatgatgtagtgatagatatgatagacaaagataaaaaccacttattacatagagactattccaacctattactagagtatataaaatctcgttacatgttattaaaggaagaggatatcgatgagaacatagtatccactttattagataagggaatcgatcctaactttaaacaagacggatatacagcgttacattattattatttgtgtctcgcacacgtttataaaccaggtgagtgtagaaaaccgataacgataaaaaaggccaagcgaattatttctttgtttatacaacatggagctaatctaaacgcgttagataattgtggtaatacaccattccatttgtatcttagtattgaaatgtgtaataatattcatatgactaaaatgctgttgacttttaatccgaatttcgaaatatgtaataatcatggattaacgcctatactatgttatataacttccgactacatacaacacgatattcttgttatgttaatacatcactatgaaacaaatgttggagaaatgccgatagatgagcgtcgtatgatcgtattcgagtttatcaaaacatattctacacgtccggcagattcgataacttatttgatgaataggtttaaaaatataaatatttatacccgctatgaaggaaagacattattacacgtagcatgtgaatataataatacacacgtaatagattatcttatacgtatcaacggagatataaatgcgttaaccgacaataacaaacacgctacacaactcattatagataacaaagaaaattccccatataccattaattgtttactgtatatacttagatatattgtagataagaatgtgataagatcgttggtggatcaacttccatctctacctatctttcgtcgcttatcatactagtcatatcctaaatgttgatcatattccaccaaatgattgtgaaagagattgagattaaatcgtctaacaaacaattagtttttatgacattaacatataataaataaattaatcattattgacttaacgatgacgaaagttatcatcatcttaggattcttgattattaatacaaattcattgtctatgaaatgtgaacaaggtgtctcatattataattcacaagaattaaagtgttgtaaactatgtaagccaggaacatattcagatcatcgatgtgataaatacagcgataccatttgtggacattgtccgagtgacacattcacgtcaatatataatcgttctccttggtgtcatagttgtagaggtccatgtggtactaatcgagtagaggtcacaccttgtacacctaccacaaatagaatctgtcattgtgactcgaatagttattgtctccttaaagcttctgatggtaactgtgttacatgtgctcctaaaacaaaatgtggtcgtgggtatggaaagaaaggagaagatgaaatgggtaataccatttgtaagaaatgtcggaagggtacttattcagatattgtatctgactctgatcaatgtaaaccaatgacaagataagacttactcgcatctactggatagacataaaatatcctcctcgtaataatgaaatataaatatacactaattattaatatcaataacaatcgagtattaatatataggtcatttttaaatcccttttgggttccgtcccaaacggcgtttcggtctgcgtcgccgccatggccatgccgagcctctccgcgtgctcctccatcgaggacgacttcaactatggcagctcggtggcgtctgccagcgtgcacatacgaatggcatttctaagaaaagtctacggtatcctttgtctacaatttcttttaacaacggcaacaactgcagtatttttatactttgactgcatgcggacatttatacaagggagtcctgttctaatattggcatcaatgttcggatctataggcttgattttcgcattgactttacacagacataaacatcccctgaatctgtacctgctttgtggatttacactgtcggaatctctaacgctggcctctgttgttactttctatgatgtgcatgtcgttatgcaagctttcatgctgactactgcagcgtttcttgctctgactacatatactctacaatcaaagagagatttcagtaaacttggagcaggattgtttgctgctttgtggattttaattttgtcaggactcttggggatatttgtgcaaaatgagacagtggagctggtcctgtctgcttttggggcccttgtattctgtggattcattatctatgacacgcactcactaatacataagctctcgcctgaagagtatgtgttagcctctatcaatctctacttggatatcatcaatctgttcttgcatctgttgcagcttttggaagtatctaataagaaataaagtttaaaatagaattaataaaaacatataggtcattttttaaacatggattggaaaccaaggtagttagttaatacacacaagatatatttttttcacatcatccacccatgggtaacaccaaggttgttagttaataatatacaagatattttttctcactctgatccatgtaaaccaaggacgagataagacactctcattcctcatccacaacccattaaaaaaatggaaattaaagccctctattagcataaacggctacaggtctaccatcaggttaaccttcgtctaccttcacaatggcctttccttgtgcccagttcagaccctgtcattgccacgctactaaggactccctgaataccgtggccgacgtcagacattgtctgactgaatacatcctgtgggtttctcatagatggacccatagagaaagcgctcatctgttctccgtgtggtctcggaacatattctcacaccgtctcttccgcagataaatgcgaacccgtacccagaaatacctttaactatatcgatgtggaaattaatctgtatcccgtcaacgacacatcgtgtactcggacgaccactaccggtctcagcgaatccatctcaacgtcggaactaactattactatgaatcataaagactgtaatcccgtctttcgtgatggatacttctccgttcttaataaggtagcgacttcaggtttctttacaggagaaaggtgtgcactctgaatttcgagattaaatgcaataacaaagattcttcctccaaacagttaacgaaagcaaagaatgatactatcatgccgcattcggagacagtaactctagtgggcgacatctatatactatatagtaataccaatactcaagactacgaaactgatacaatctcttatcatgtgggtaatgttctcgatgtcgatagccatatgcccggtagttgcgatatacataaactgatcactaattccaaacccacccactttttatagtaagtttttcacccataaataataaatacaataattaatttctcgtaaaagtagaaaatatattctaatttattgcacggtaaggaagtagaatcataaagaacagtactcaatcaatagcaattatgaaacaatatatcgtcctggcatgcatgtgcctggcggcagctgctatgcctgccagtcttcagcaatcatcctcatcctcctcctcgtgtacggaagaagaaaacaaacatcatatgggaatcgatgttattatcaaagtcacaaagcaagaccaaacaccgaccaatgataagatttgccaatccgtaacggaaattacagagtccgagtcagatccagatcccgaggtggaatcagaagatgattccacatcagtcgaggatgtagatcctcctaccacttattactccatcatcggtggaggtctgagaatgaactttggattcaccaaatgtcctcagattaaatccatctcagaatccgctgatggaaacacagtgaatgctagattgtccagcgtgtccccaggacaaggtaaggactcatgaagaagctcttgctatgatcaaagactgtgaggtgtctatcgacatcagatgtagcgaagaagagaaagacagcgacatccagtactcgggtctaacatctctcataagaaagtgagttacgaagatatcatcggttcaacgatcgtcgatacaaaatgtgtcaagaatctagagtttagcgttcgtatcggagacatgtgcaaggaatcatctgaacttgaggtcaaggatggattcaagtatgtcgacggatcggcatctgaaggtgcaaccgatgatacttcactcatcgattcaacaaaactcaaagcgtgtgtctgaatcgataactctattcatctgaaattggatgagtagggttaatcgaacgattcaggcacaccacgaattaaaaaagtgtaccggacactatattccggtttgcaaaacaaaaatgttcttaactacattcacaaaaagttacctctcgcgacttcttctttttctgtctcaatagtgtgatacgattatgacactattcctattcctattcctatttcctttcagagtatcacaaaaatattaaacctctttctgatggtctcataaaaaaagttttacaaaaatatttttattctctttctctctttgatggtctcataaaaaaagttttacaaaaatatttttattctctttctctctttgatggtctcataaaaaaagttttacaaaaatatttttattctctttctctctttgatggtctcataaaaaaagttttacaaaaatatttttattctctttctctctttgatggtctcataaaaaaagttttacaaaaatatttttattctctttctctctttgatggtctcataaaaaaagttttacaaaaatatttttattctctttctctctttgatggtctcataaaaaaagttttacaaaaatatttttattctctttctctctttgatggtctcataaaaaaagttttacaaaaatatttttattctctttctctctttgatggtctcataaaaaaagttttacaaaaatatttttattctctttctctctttgatggtctcataaaaaaagttttacaaaaatatttttattctctttctctctttgatggtctcataaaaaaa

SEQ ID NO: 4 - DNA, 193964 bp, Artificial Sequence
  LIVP 2.1.1
gagatagttagtctagatatttttcttagtacaaaagtcaatgttttaaaatatatggacaagaatttgtctgtataaaaacttgtgtgaaattttgtaccaaagaaaaaatgtgagcagtatcccctacatggattttactagatcatttatataccaaaaaatattatacgatctacgttttattatatgattttaacgtgtaaattataaacattattttatgatatacaattgtctggtaacctagatgggcataggggatgttgataagctcgacgagtatatgttgttggacgttattgtttaagaaatagttgatgcatcagaaagagaataaaaaatattttagtgagaccatcgaagagagaaagagataaaacttttttacgactccatcagaaagaggtttaatatttttgtgagaccatcgaagagagaaagagaataaaaatattttatgactccattgaagagagaaaaagaaaatgagaatgagaataaaaatattttagtgacaccatcagaaagaggtttaatatttttgtgagaccatcgaagagagaaagagaataaaaatattttatgactccattgaagagagaaagagaaaatgagaatgagaataaaaatattttagtgacaccatcagaaagaggtttaatattttttatgagaccatcaaagagagaaagaaaataaaaatatttttgtaaaactttttttatgagaccatcaaagagagaaagagaataaaaatatttttgtaaaactttttttatgagaccatcaaagagagaaagagaataaaaatatttttgtaaaactttttttatgagaccatcaaagagagaaagagaataaaaatatttttgtaaaactttttttatgagaccatcaaagagagaaagagaataaaaatatttttgtaaaactttttttatgagaccatcaaagagagaaagagaataaaaatatttttgtaaaactttttttatgagaccatcaaagagagaaagagaataaaaatatttttgtaaaactttttttatgagaccatcaaagagagaaagagaataaaaatatttttgtaaaactttttttatgagaccatcaaagagagaaagagaataaaaatatttttgtaaaactttttttatgagaccatcaaagagagaaagagaataaaaatatttttgtaaaactttttttatgagaccatcaaagagagaaagagaataaaaatatttttgtaaaactttttttatgagaccatcagaaagaggtttaatatttttgtgatactctgaaaggaaataggaataggaataggaatagtgtcataatcgtatcacactattgagacagaaaaagaagaagtcgcgagaggtaactttttgtgaatgtagttaagaacatttttgttttgcaaaccggaatatagtgtccggtacacttttttaattcgtggtgtgtctgaatcgttcgattaaccctactcatccaatttcagatgaatagagttatcgattcagacacacgctttgagttttgttgaatcgatgagtgaagtatcatcggttgcaccttcagatgccgatccgtcgacatacttgaatccatccttgacctcaagttcagatgattccttgcacatgtctccgatacgaacgctaaactctagattcttgacgcattttgtatcgacgatcgttgaaccgatgatatcttcgtaactcactttcttatgagagatgttagacccgagtactggatgggtcttgatgtcgctgtctttctcttcttcgctacatctgatgtcgatagacacttcacagtctttgatcatagcaagagcttcttcatgagtgatcgcgggagagtccttaccttgtcctggggacacgctggacaatctagcattcactgtgtttccatcagcggattctgagatggatttaatctgaggacatttggtgaatccaaagttcattctcagacctccaccgatgatggagtaataagtggtaggaggatctacatcctcgactgatgtggaatcatcttctgattccacctcgggatctggatctgactcggactctgtaatttccgttacggattggcaaatcttatcattggtcggtgtttggtcttgctttgtgactttgataataacatcgattcccatatgatgtttgttttcttcttccgtacacgaggaggaggatgaggatgattgctgaagactggcaggcatagcagctgccgccaggcacatgcatgccaggacgatatattgtttcataattgctattgattgagtactgttctttatgattctacttccttaccgtgcaataaattagaatatattttctacttttacgagaaattaattattgtatttattatttatgggtgaaaaacttactataaaaagtgggtgggtttggaattagtgatcagtttatgtatatcgcaactaccgggcatatggctatcgacatcgagaacattacccacatgataagagattgtatcagtttcgtagtcttgagtattggtattactatatagtatatagatgtcgcccactagagttactgtctccgaatgcggcatgatagtatcattctttgctttcgttaactgtttggaggaagaatctttgttattgcatttaatctcgaaattcagagtgcacacctttctcctgtaaagaaacctgaagtcgctaccttattaagaacggagaagtatccatcacgaaagacgggattacagtctttatgattcatagtaatagttagttccgacgttgagatggattcgctgagaccggtagtggtcgtccgagtacacgacgtgtcgttgacgggatacaggttaatttccacatcgatatagttaaaggtattactgggtacgggttcgcatttatctgcggaagagacggtgtgagaatatgttccgagaccacacggagaacagatgacgtctccggatactccgtatcctattctacattttgtttgggaaacacatgccttgcatccggatgatcctttgagaagacaataatatccgggagagcattcacagattctattgtgagtcgtgttacacgatcgcgtcttccgttacaacttagacaagcgggtaaatgattattgcgagatgtgaaggtacccgaaccacacggcgtacattgtgtgttagtcttgctatcgcataatctggaagcgtatgttcccggacacaaattatggcgtttgtattcgttgtctttacactttccatcggatggtgcatgcggtgctatatctcttccgtttattattatacatgagagaaacaatatatacgagtataatacggacttcatgatttaataatgtagtaatcgtcgtcttgttcctgtttcctacttctccaatcatatagatattttctttctatcatggataatatttgtaatggttctttccgtacaacatactgtttagatgatattgcgcataatttccggaggcaaatacgatagtctagattgaccgatggtagactctaatttattgagtgctttgtcgacgagtttacttttacgctccatcgatagatggcactgttctatgagatcgtcgtacatgggaaatgaaatgtgactgtctgaatgtatggctttaagatagctgtgataccgtatacaggtcggtgtcggagattcgaatctctttaaggcgacttatgtcacgatgatggaatctatcttatcgaatgatatatttttcataaatacacttttatagtcctcgtttaaacagaatttactatgtagttccgcgaatgactcgtcccttaataggcagtaggctagtatcttttttacgtagtaatcgtcgtagggagagacatcttgtagaacaacgatttaatcataggtagagatactttcagtctgtggtggatgatgtcattcacaacatccgccttgtatatgatgtttctgttttcaaacaccaagtcgaataccgtctttagtcggaaggttgatgtcgtatccgatgtatgaggcaacattgttgttacaattttgaaaggcggtattatagtattcgtctttctgaatgtcgaacctatctaatagataccgtagtatattgagagtgtatccttgattatgttttatgaatagataaagtagatgttgtccttcttccttttgttcgtgccaattgagtaacattatgagaatatgacctgttgcacaatcgttccatgatgggtgtacaatcaagattattacgtatcctcgtatcggctcctcgagataaaagagcatacaccacacgaggactatgtttggtatactgttgaaggtaagtgtgtaaccgcgttaatgtttgctccataatctattatcgcgtagatgaatcgcttctcggctcgcatcttagtgtgacttaacttgtaataattgctttcgtagaacgtggatatgtgtttacagtagtaatgaagagaagtgagttcatcctcgtcggcgcaattagggtcggatcctttgtacagaacgtaatagtttaagctcccattgaatttatatctaagataacacagcaatagatcggatgatttactaaagtcatcaatggtgtccgttagtatatcaaagatcttgttatcgattgatagtggtcatccttgctatcaaagttacgcatgccgtggtgtaacaatatctttaatacagatggattaaatcgtgtattcatcgtatagcaatgtaatggagagttacctcgtttattcagatcgcagtgtttaataactagcttaaacagatgagacgatgtatccacatcaaagaacgtaaaatacatatgacagacattgttgacagaaacgtgaccttcattcttaccgtcgtccataaatacgttaggtatgtaccacatactgtcgcgaacgatgcgtacaatctcgtccatctcataatgatttactttttcataattaaagatgtgaaagaaaaccgaacaatatatttttttagtaatgtttatgcgagacatataaaataaactccgtgtttatgatgccggtaaatgtttttatcatcttggacggaatcgattttgtaatatgtcatggaaacaaatgaaacaggacattatcgctccatgataaattatttaatggagtaataaagtatctccatgggtaatttcgaaatcaagttatcgtctgtattaatgttgtccactatggagtcgatcctctcattgttctttacagtttctgtaatgatggacgttagttcttttttgtaccatttgatgtcggattctttgcgtatctcaatttgtggcgtttgcttcgtttaaataatatatcaaacatggagacgcctgatatgtagacattcttcattctattaatgtctactctatagcgctttagttccttatgacgaccggcgatatcatactttactttagaaggaaaatcatcatctaggattaaggcgtatctgatacaggcgaataatggttcaggatatagatagcgtatatctctattaaatgcgtcaatcatagtctctagagtgggatggtaactcagtaataaatcaactagcttcgttttgttttctctttggtaactgcttttctggatggccgtattgattatcgagcgtgacactcgctccatattccaataaccgctttgcaaattgtatattattgacatcgaccgcgtaatatagtagagttatcgatcatatctatatcatccatgtacttgcttagtatatcaaatacatctatcagtatggtttcataacagtgatacccgcaattattaaatctcgataatatcagaccgtacatacatagacggccattgttcgatacgtgatttacagccgcgtgtccatattttccacgataaaccttacgacgtttacatcgacgagattattattaacaaagtagtcgtgcagaggatagttgttgtccgttatctaacatgcatcgaacgaccatatcgccgtaatgtaagtagtttatcaacatggcttgtacatcctgttgtctaaatctctttagaatgttatcgatgatgtagtggttatattctctggaatcgtacgaagtaatactacgcattacgtcgacaagagtatgacgtctctcaataagaagattaacgatttccatgtctacattatatggggttactctaaatcgcttgtttagataatatagggctgacgtcgtatactctacacgtgtccacatcctttattaataataatttaacaatctctatatctatggttgagaaagaccagtagtattggatgggtaaagatcctccttcgtctctgccatggatggaaacattgttatcgatcaaacatttaattacatccttggatagagattgagattctctatgagacgatatatagtaatgaagagagttcttacacatatcactgtcgtacatacaggtacgaaatacgtaaccggtgctgtaacattctgatttaagaagccatagcaatacttctggtctcggattaggcgtcgttacgtatatatccaccaatccgagaccattgattgcataattcgtattcttggacggacgtatccgtttatccacaattaggtattttagcagacgtaagtcgatattatccgaatacagatcgaaatcatttatattcgacttgagttcgttagaggaatttgaatagctggatatcagtagatgcacaatctgagatttgacgtatctatgcttactgtatactcctagcggagttaatccttcgttgtttctacaaagtctctcgactccgcgagagaacaatcttaatgtctgtatcgcatttattggagacgtaacaatgtagcgcattgtttcctcgtctatctatatgttttgataagttgtgacacgtttcaatttctagttttatttttttgtacgtcacatcttcatccagtagacgacatagaatagtgcactctctaccacaataatccatagctattctggtgctaattattcctatttcacgaaggcaatcattcctcataagatgataaaaagtgtagtggagatttagtatttagcagtgcggatatgatccaagagggtgagatagtcgttctcgttcagaatctttcgcagcataagtagtatgtcgatatacttatcgttgaagactctttataaaagtctatttgtttatatttattgcggatagcagtatttccctataaaaagtatacgtcctgtggtgtctttaatcatgtacatgaatggatggtttatgtagaccttcgtacgatataccatcgaaaagttaatcgtaaatactcctgtaacggccgatgcttctgtatactcctcattaacatctataaacgtcgtatgtagaaatttttctacagtgatagtttcattacacatcttgctaaaatctgcataatatccgaatatattagtaagtcctaaattttctaaaatcggtaccagattatacggttctgtcatttccactttaaactttggcatatacaagtctatacttttagtagataacataccacaccattttttaaatttttcatctgttatatttttttctatgttatatataccttctatgtcgtccggtagtataattaccatactagagtttccctcgtatggaatatcgataatagagaatcctccgaataattcattaatatgtacatattgcaagttattctcggtacccaccatcatatcaacgctggtaactatattcttagaaatataaaacttgtctgtatatgtaagatgtttagaaaatggatatttccacattgctttaaaatggacggcgctaacaactgtcatacgagtattaatggatagcggactagtcaataaggaattaattttaccatttgtcattgtcttaacccattcgttgattagttcctttgtttggttagcattattaaagtttacagtttgaaaatcgtcttttattttttgtaggaaggaggcgtggaactcgatactatcgctaccgtatattttatttgcggtagctagtgtcgcacaatacggaatatctacctccatgtcatcattattgtcatcgggtgtattctcattcatattctctatatattttgatagttgttcagctgtagaaccagctgctccatgatttagaatagataaagtagataaaatggaaactggagaaatcaaaacattttcatcagggtgttttaagattagttctttaaagatatccatggtatagacctaacgataacgatatatatcataaataaataatgttaaatttcaatttatgtttgtaccccgtattcatacttaacaaattggtattgcgtacacaatcaatcatattacataccattaataatgcaagcataaaaaattgttagtagatgtttctaaatataggttccgtaagcaaagaatataagaatgaagcggtaatgataaaatcaatcgttatctaaaatgatcatactcatttattttattctattatattaacacatacatttttaacagcaacacattcaatattgtattgttatttttatattatttacacaattaacaatatattattagtttatattactgaattaataatataaaattcccaatcttgtcataaacacacactgagaaacagcataaacacagaatccatcaaaaatgttgataaattatctgatgttgttgttcgctgctatgataatcagatcattcgccgatagtggtaacgctatcgaaacgacattgccagaaattacaaacgctacaacagatattccagctatcagattatgcggtccagagggagatggatattgtttacacggtgactgtatccacgctagagatattgacggtatgtattgtagatgctctcatggttatacaggcattagatgtcagcatgtagtattagtagactatcaacgttcagaaaacccaaacactacaacgtcatatatcccatctcccggtattatgcttgtattagtaggcattattatgtgttgtctattatctgtttataggttcactcgacgaactaaactacctatacaagatatggttgtgccataatttttataaattttttttatgagtatttttacaaaaatgtataaagtgtatgtcttatgtatatttataaaaatgctaagtatgcgatgtatctatgttatttgtatttatctaaacaatacctctacctctagatattatacaaaaattttttatttcggcatattaaagtaaaatctagttaccttgaaaatgaatacagtgggtggttccgtatcaccagtaagaacataatagtcaaatacagtatccgattgagattttgcatacaatactagtctagaaagaaatttgtaatcatcttctgtgacgggagtccatatatctgtatcatcgtctagtttatcagtgtcccatgctatattcctgttatcatcattagttaatgaaaataactctcgtgcttcagaaaagtcaaatattgtatccatacatacatctccaaaactatcgcttatacgtttatctttaacgatacctatacctagatggttatttactaacagacattttccagatctattgactataactcctatagtttccacatcaaccaagtaatgatcatctattgttatataacaataacataactcttttccatttttatcagtatgtatatctatatcaacgtcgtcgttgtagtgaatagtagtcattgatctattatatgaaacggatatgtctagaacggcaattgttttacgtccagttaacactttcgttgatttaaagtctagagtctttgcaaacataatatccttatccgactttatatttcctgtagggtggtataattttattttgcctccacatatcggtgtttccaaatatattactagacaatattccatatagttattagttaagggtacccaattagaacacgtacgcttattatcatcatttggatcgtatttcataaaagttattgtgttatcgatgtcaacacattctacattttttaatcgtctatatagtatttttctgatattttctataatatcagaattgtcttccatcggaagttgtatactatcggaatcagttacatgtttaaataattctctgatgtcattccttatacaatcaaattcattattaaacagtttaatagtctgtagacctttatcgtcgtaaatatccattgtcttattagttacgcttatttttatgtgttttacgttgctttattatattttataagaatgattgtttgacgaatcacgagaactattaagacacattattaggtatatattataaaaaagtttttgattacgatgttataagaggaaagaggacacattaacatcatacatcaattaactacattcttataacatcgtaatcaaaagaattgcaattttgatgtataacaactgtcaatgggttatggaattgtatattacatattatacggtatgttggtaacgacaaataccggtcggtaattgtctgccggtgtaatagaattatatatatctatctattacaccggccttgtatacataataataagttgtggtagtatgatctccatatttataatttaggactttgtattcagtatttttggaatcataaaaaataaaaaaaagttttactaatttaaaatttaaaaagtatttacatttttttcactgtttagtcgcggatatggaattcgatcctgccaaaatcaatacatcatctatagatcatgtaacaatattacaatacatagatgaaccaaatgatataagactaacagtatgcattatccgaaatattatatcaatatcacaaaaataaatacacatttggctaatcaatttcgggcttggaaaaaacgtatcgccggaagggactatatgactaacttatctagagatacaggaatacaacaatcaaaacttactgaaactatacgtaactgtcaaaaaaatagaaacatatatggtctatatatacactacaatttagttattaattggataaccgatgtgattatcaatcaatattaagagggttggtaaattggtacatagctaataatacctatactccaaatacacccaataatacaacaaccatttctgagttggatatcatcaaaatactggataaatacgaggacgtgtatagagtaagtaaagaaaaagaatgtggaatttgctatgaagttgtttactcaaaacgatagatactttggtttattggattcgtgtactcatatattttgcataacatgcatcaatatatggcataaaacacgaagagaaaccggtgcgtcggataattgtcctatatgccgtacccgttttagaaacataacaatgagcaagttctataagctagttaactaataaataaaaagtttaatttgttgacgacgtatgtcgttattttttctcgtataaaagattaatttgattctaatataatctttagtattggataaatatcaattcaaattaattccattagattatatcataaataaaaatagtagcacgcactacttcagccaaatattcttttttgaaacgccatctatcgtagtgaggacacaagtgaacctataattatcaaatttattagtatcagtcacatgaaggactttacgtagagtgacgattccactatctgtggtacgaacggtttcatcttctttgatgccatcacccagatgttctataaacttggtatcctcgtccgatctcatatcctttgccaaccaatacatgtagctaaaattaggcataaatttcacacatcctgaacaatgaaattctccagaagatgttacaatgtctagatttggacatttggtttcaaccgcgttaacatatgagtgaacacacccatacatgaaagcgatgagaaataggattctcatcttgccaaaatatcactagaaaaaatttatttatcaattttaaaggtataaaaaatacttattgttgctcgaatattttgtatttgatggtatacggaagattagaaatgtaggtattatcatcaactgattctatggttttatgtattctatcatgtttcactattgcgttggaaataatatcatatgcttccacatatattttattttgttttaactcataatactcacgtaattctggattattggcatatctatgaataattttagctccatgatcagtaaatattaatgagaacatagtattaccacctaccattatttttttcatctcattcaattcttaattgcaaagatctatataatcattatagcgttgacttatggactctggaatcttagacgatgtacagtcatctataatcatggcatatttaatacattgttttatagcatagtcgttatctacgatgttagatatttctctcaatgaatcaatcacacaatctaatgtaggtttatgacataatagcattttcagcagttcaatgtttttagattcgttgatggcaatggctatacatgtatatccgttatttgatctaatgttgacatctgaaccggattctagcagtaaagatactagagattgtttattatatctaacagccttgtgaagaagtgtttctcctcgtttgtcaatcatgttaatgtctttaagataaggtaggcaaatgtttatagtactaagaattgggcaagcataagacatgtcacaaagaccctttttgtatgtataagtgtagaaattataacatccatagttggatttacataggtgtccaatcgggatctctccatcatcgagataattgatggcatctcccttccttttttagtagatatttcatcgtgtaagaatcaatattaatatttctaaagtatccgtgtatagcctctttatttaccacagttccatattccactagagggatatcgccgaatgtcatatactcaattagtatatgttggaggacatccgagttcattgttttcaatatcaaagagatggtttccttatcatttctccatagtggtacaatactacacattatttcgtgcggctttccattttccaaaaacaatttgaccaaatctacatctttattgtatctataatcactatttagataatcagccataattcctcgagtgcaacatgttagatcgtctatatatgaataagccgtgttatctattcctttcattaacaatttaacgatgtctatatctatatgagatgacttaatataatattgaagagctgtacaatagtttttatctataaaagacggcttgattccgtgattaattagacatttaacaacttccggacgcacatatgctctcgtatccgactctgaatacagatgagagatgatatacagatgcaatacggtaccgcaatttcgtagttgataatcatcatacgcgtatcagtactcgtcctcataaagaacactgcagccattttctatgaacaaatcaataatttcaggaacaggatcatctgtcattacataattttctataactgaacgatggttttcacatttaacactcaagtcaaatccatgttctaccaacacctttatcaagtcaacgtctacatttttggatttcatatagctgaatatattaaagttatttatgttgctaaatccagtggcttctagtagagccatcgctatatccttattaactttaacatgtctactatttgtgtattcttctaatggggtaagctgtctccaatttttgcgtaatggattagtgccactgtctagtagtagtttgacgacctcgacattattacaatgctcattaaaaaggtatgcgtgtaaagcattattcttgaattggttcctggtatcattaggatctctgtctctcaacatctgtttaagttcatcgagagccacctcctcattttccaaatagtcaaacattttgactgaatgagctactgtgaactctatacacccacacaactaatgtcattaaatatcatgtcaaaaacttgtacaattattaataaaaataatttagtgtttaaattttaccagttccagattttacacctccgttaatacctccattaaccccactggacgatcctcctccccacattccaccgccaccagatgtataagttttagatcctttattactaccatcatgtccatggataaagacactccacatgccgccactaccccctttagaagacatattaataagacttaaggacaagtttaacaataaaattaatcacgagtaccctactaccaacctacactattatatgattatagtttctatttttacagtaccttgactaaagtttctagtcacaagagcaatactaccaacctacactattatatgattatagtttctatttttataggaacgcgtacgagaaaatcaaatgtctaatttctaacggtagtgttgataaacgattatcgtcaatggatacctcctctatcatgtcgtctattttcttactttgttctattaacttattagcattatatattatttgattataaaacttatattgcttattagcccaatctgtaaatatcggattattaacatatcgtttctttgtaggtttatttaacttgtacatcactgtaagcatgtccttaccatttattttaatttgacgcatatccgcaatttctttttcgcagtcggttataaattctatatatgatggatacatgctacatgtgtacttataatcgactaatatgaagtacttgatacatatttccagtaacgatttattattaccacctatgaataagtacctgtgatcgtctaggtaatcaactgttttcttaatacattcgatggttggtaatttactcagaataatttccaatatcttaatatataattctgctatttctgggatatatttatctgccagtataacacaaatagtaatacatgtaaacccatattttgttattatattaatgtctgcgccattatctattaaccattctactaggctgacactatgcgactcaatacaatgataaagtatactacatccatgtttatctattttgtttatatcattaatatacggcttacaaagttttagtatcgataacacatccaactcacgcatagagaaggtagggaataatggcataatatttattaggttatcatcattgtcattatctacaactaagtttccattttttaaaatatactcgacaactttaggatctctattgccaaatttttgaaaatatttatttatatgcttaaatctatataatgtagctccttcatcaatcatacatttaataacattgatgtatactgtatgataagatacatattctaacaatagatcttgtatagaatctgtatatcttttaagaattgtggatattaggatattattacgtaaactattacacaattctaaaatataaaacgtatcacggtcgaataatagttgatcaactatataattatcgattttgtgatttttcttcctaaactgtttacgtaaatagttagatagaatattcattagttcatgaccactatagttactatcgaataacgcgtcaaatatttcccgtttaatatcgcatttgtcaagataataatagagtgtggtatgttcacgataagtataataacgcatctctttttcgtgtgaaattaaatagtttattacgtccaaagatgtagcataaccatcttgtgacctagtaataatataataatagagaactgttttacccattctatcatcataatcagtggtgtagtcgtaatcgtaatcgtctaattcatcatcccaattataatattcaccagcacgtctaatctgttctattttgatcttgtatccatactgtatgttgctacatgtaggtattcctttatccaataatagtttaaacacatctacattgggatttgatgttgtagcgtatttttctacaatattaataccatttttgatactatttatttctatacctttcgaaattagtaatttcaataagtctatatcgatgttatcagaacatagatattcgaatatatcaaaatcattgatatttttatagtcgactgacgacaataacaaaatcacgacatcgtttttgatattattatttttcttggtaacgtatgcctttaatggagtttcaccatcatactcatataatggatttgcaccactttctatcaatgattgtgcactgctggcatcgatgttaaatgttttacaactatcatagagtatcttatcgttaaccatgattggttgttgatgctatcgcattttttggtttctttcatttcagttatgtatggatttagcacgtttgggaagcatgagctcatatgatttcagtactgtagtgtcagtactattagtttcaataagatcaatctctagatctatagaatcaaaacacgataggtcagaagataatgaatatctgtaggcttcttgttgtactgtaacttctggttttgttagatggttgcatcgtgctttaacgtcaatggtacaaattttatcctcgctttgtgtatcatattcgtccctactataaaattgtatattcagattatcatgcgatgtgtatacgctaacggtatcaataaacggagcacaccatttagtcataaccgtaatccaaaaatttttaaagtatatcttaacgaaagaagttgtgtcattgtctacggtgtatggtactagatcctcataagtgtatatatctagagtaatgtttaatttattaaatggttgataatatggatcctcgtgacaatttccgaagatggaaataagacataaacacgcaataaatctaattgcggacatggttactccttaaaaaaatacgaataatcaccttggctatttagtaagtgtcatttaacactatactcatattaatccatggactcataatctctatacgggattaacggatgttctatatacggggatgagtagttctcttctttaactttatactttttactaatcatatttagactgatgtatgggtaatagtgtttgaagagctcgttctcatcatcagaataaatcaatatctctgtttttttgttatacagatgtattacagcctcatatattacgtaatagaacgtgtcatctaccttattaactttcaccgcatagttgtttgcaaatacggttaatcctttgacctcgtcgatttccgaccaatctgggcgtataatgaatctaaactttaattgcttgtaatcattcgaaataatttttagtttgcatccgtagttatcccctttatgtaactgtaaatttctcaacgcgatatctccattaataatgatgtcgaattcgtgctgtatacccatactgaatggatgaacgaataccgacggcgttaatagtaatttactttttcatctttacatattgggtactagttttactatcataagtttataaattccacaagctactatggaataagccaaccatcttagtataacacacatgtcttaaagtttattaattaattacatgttgttttatatatcgctacgaatttaaacagagaaatcagtttaggaaaaaaaattatctatctacatcatcacgtctctgtattctacgatagagtgctactttaagatgcgacagatctgtgtcatcaaatatatactccattaaaatgattattccggcagcgaacttgatattggatatatcacaacctttgttaatatctacgacaatagacagcagtcccatggttccataaacagtgagtttatctttctttgaagagatattttgtagagatcttataaaactgtcgaatgacatcgcatttatatttttagctaaatcgtatatgttaccatcgtaatatctaaccgcgtctatcttaaacgtttccatcgctttaaagacgtttccgatagatggtctcatttcatcagtcatactgagccaacaaatataatcgtgtataacatctttgatagaatcagactctaaagaaaacgaatcggctttattatacgcattcatgataaacttaatgaaaaatgtttttcgttgtttaagttggatgaatagtatgtcttaataattgttattatttcattaattaatatttagtaacgagtacactctataaaaacgagaatgacataactaatcataactagttatcaaagtgtctaggacgcgtaattttcatatggtatagatcctgtaagcattgtctgtattctggagctattttctctatcgcattagtgagttcagaatatgttataaatttaaatcgaataacgaacataactttagtaaagtcgtctatattaactcttttattttctagccatcgtaataccatgtttaagatagtatattctctagttactacgatctcatcgttgtctagaatatcacatactgaatctacatccaattttagaaattggtctgtgttacatatctcttctatattattgttgatgtattgtcgtagaaaactattacgtagaccattttctttataaaacgaatatatagtactccaattatctttaccgatatatttgcacacataatccattctctcaatcactacatctttaagattttcgttgttaagatatttggctaaactatataattctattagatcatcaacagaatcagtatatatttttctagatccaaagacgaactctttggcgtcctctataatattcccagaaaagatattttcgtgttttagtttatcgagatctgatctgttcatatacgccatgattgtacggtacgttatgataaccgcataaaataaaaatccattttcatttttaaccaatactattcataattgagattgatgtaatactttgttactttgaacgtaaagacagtacacggatccgtatctccaacaagcacgtagtaatcaaatttggtgttgttaaacttcgcaatattcatcaatttagatagaaacttatactcatcatctgttttaggaatccatgtattattaccactttccaacttatcattatcccaggctatgtttcgtccatcatcgttgcgcagagtgaataattcttttgtattcggtagttcaaatatatgatccatgcatagatcggcaaagctattgtagatgtgatttttcctaaatctaatataaaactcgtttactagcaaacactttcctgatttatcgaccaagacacatatggtttctaaatctatcaagtggtggggatccatagttatgacgcagtaacatatattattacattcttgactgtcgctaatatctaaatatttattgttatcgtattggattctgcatatagatggcttgtatgtcaaagatatagaacacataaccaatttatagtcgcgctttacattctcgaatctaaagttaagagatttagaaaacattatatcctcggatgatgttatcactgtttctggagtaggatatattaaagtctttacagatttcgtccgattcaaataaatcactaaataatatcccacattatcatctgttagagtagtatcattaaatctattatattttatgaaagatatatcactgctcacctctatatttcgtacatttttaaactgtttgtataatatctctctgatacaatcagatatatctattgtgtcggtagacgataccgttacatttgaattaatggtgttccattttacaacttttaacaagttgaccaattcatttctaatagtatcaaactctccatgattaaatattttaatagtatccattttatatcactacggacacaaagtagctgacataaaccattgtataatttttatgttttatgtttattagcgtacacattttggaagttccggcttccatgtatttcctggagagcaagtagatgatgaggaaccagatagtttatatccgtacttgcacttaaagtctacattgtcgttgtatgagtatgatcttttaaacccgctagacaagtatccgtttgatattgtaggatgtggacatttaacaatctgacacgtgggtggatcggaccattctcctcctgaacacaggacactagagttaccaatcaacgaatatccactattgcaactataagttacaacgctcccatcggtataaaaatcctcgtatccgttatgtcttccgttggatatagatggaggggattggcatttaacagattcacaaataggtgcctcgggattccataccatagatccagtagatcctaattcacaatacgatttagattcaccgatcaactgatatccgctattacaagagtacgttatactagagccaaagtctactccaccaatatcaagttggccattatcgatatctcgaggcgatgggcatctccgtttaatacattgattaaagagtgtccatccagtacctgtacatttagcatatataggtcccattttttgctttctgtatccaggtagacatagatattctatagtgtctcctatgttgtaattagcattagcatcagtctccacactattcttaaatttcatattaatgggtcgtgacggaatagtacagcatgatagaacgcatcctattcccaacaatgtcaggaacgtcacgctctccaccttcatatttatttatccgtaaaaatgttatcctggacatcgtacaaataataaaaagcccatatatgttcgctattgtagaaattgtttttcacagttgctcaaaaacgatggcagtgacttatgagttacgttacactttggagtctcatctttagtaaacatatcataatattcgatattacgagttgacatatcgaacaaattccaagtatttgattttggataatattcgtattttgcatctgctataattaagatataatcaccgcaagaacacacgaacatctttcctacatggttaaagtacatgtacaattctatccatttgtcttccttaactatatatttgtatagataattacgagtctcgtgagtaattccagtaattacatagatgtcgccgtcgtactctacagcataaactatactatgatgtctaggcatgggagacttttttatccaacgatttttagtgaaacattccacatcgtttaatactacatatttctcatacgtggtataaactccacccattacatatatatcatcgtttacgaataccgacgcgcctgaatatctaggagtaattaagtttggaagtcttatccatttcgaagtgccgtgtttcaaatattctgccacacccgttgaaatagaaaattctaatcctcctattacatataactttccatcgttaacacaagtactaacttctgattttaacgacgacatattagtaaccgttttccattttttcgtttcaagatctacccgcgatacggaataaacatgtctattgttaatcatgccgccaataatgtatagacaattatgtaaaacatttgcattatagaattgtctatctgtattaccgactatcgtccaatattctgttctaggagagtaatgggttattgtggatatataatcagagtttttaatgactactatattatgttttataccatttcgtgtcactggctttgtagatttggatatagttaatcccaacaatgatatagcattgcgcatagtattagtcataaacttgggatgtaaaatgttgatgatatctacatcgtttggatttttatgtatccactttaataatatcatagctgtaacatcctcatgatttacgttaacgtcttcgtgggataagatagttgtcagttcatcctttgataattttccaaattctggatcggatgtcaccgcagtaatattgttgattatttctgacatcgacgcattatatagttttttaattccatatcttttagaaaagttaaacatccttatacaatttgtgaaattaatattatgaatcatagtttttacacatagatctactacaggcggaacatcaattattatggcagcaactagtatcatttctacattgtttatggtgatgtttatcttcttccagcgcatatagtctaatagcgattcaaacgcgtgatagtttataccattcaatataatcgcttcatcctttagatggtgatcctgaatgcgtttaaaaaaattatacggagacgccgtaataatttccttattcacttgtataatttccccattgatagaaaatattacgctttccattcttaaagtactataagtaattatagtataatgtaaacgtttatatattcaatatttttataaaaatcattttgacattaattcctttttaaatttccgtctatcatctatagaaacgtattctatgaatttataaaatgcttttacgtgtcctatcgtaggcgatagaaccgctaaaaagcctatcgaatttctacaaaagaatctgttatatggtatagggagagtataaaacattaaatgtccgtacttattaaagtattcagtagccaatcctaactctttcgaatacttattaatggctcttgttctgtacgaatctatttttttgaacaacggacctagtggtatatcttgttctatgtatctaaaataatgtctgactagatccgttagtttaatatccgcagtcatcttgtctagaatggcaaatctaactgcgggtttaggctttagtttagtttctatatctacatctatgtctttatctaacaccaaaaatataatagctaatattttattacaatcatccggatattcttctacgatctcactaactaatgtttctttggttatactagtatagtcactatcggacaaataaagaaaatcagatgatcgatgaataatacatttaaattcatcatctgtaagatttttgagatgtctcattagaatattattagggttagtactcattatcattcggcagctattacttattttattatttttcaccatatagatcaatcattagatcatcaaaatatgtttcaatcatcctaaagagtatggtgaatgactcttcccatctaatttctgaacgttcaccaatgtctctagccactttggcactaatagcgatcattcgcttagcgtcttctatattattaactggttgattcaatctatctagcaatggaccgtcggacagcgtcattctcatgttcttaatcaatgtacatacatcgccgtcatctaccaattcatccaacaacataagctttttaaaatcatcattataataggtttgatcgttgtcatttctccaaagaatatatctaataagtagagtcctcatgattagttaacaactattttttatgttaaatcaattagtacaccgctatgtttaatacttattcatattttagtttttaggattgagaatcaatacaaaaattaatgcatcattaattttagaaatacttagtttccacgtagtcaatgaaacatttgaactcatcgtacaggacgttctcgtacaggacgtaactataaaccggtttatatttgttcaagatagatacaaatccgataactttttttacgaattctacgggatccactttaaaagtgtcataccgggttctttttatttttttaaacagatcaatggtgtgatgttgattaggtcttttacgaatttgatatagaatagcgtttacatatcctccataatggtcaatcgccatttgttcgtatgtcataaattctttaattatatgacactgtgtattatttagttcatccttgttcattgttaggaatctatccaaaatggcaattatactagaactataggtgcgttgtatacacatattgatgtgtctgtttatacaatcaatgctactaccttcgggtaaaattgtagcatcatataccatttctagtactttaggttcattattatccattgcagaggacgtcatgatcgaatcataaaaaaatatattatttttatgttattttgttaaaaataatcatcgaatacttcgtaagatactccttcatgaacataatcagttacaaaacgtttatatgaagtaaagtatctacgatttttacaaaagtccggatgcataagtacaaagtacgcgataaacggaataataatagatttatctagtctatctttttctatagctttcatagttagatacatggtctcagaagtaggattatgtaacatcagcttcgataaaatgactgggttatttagtcttacacattcgctcatacatgtatgaccgttaactacagagtctacactaaaatgattgaacaatagatagtctaccattgtttcgtattcagatagtacagcgtagtacatggcatcttcacaaattatatcattgtctaatagatatttgacgcatcttatggatcccacttcaacagccatcttaaaatcggtagaatcatattgctttcctttatcattaataatttctagaacatcatctctatcataaaagatacaaatattaactgtttgatccgtaataacattgctagtcgatagcaatttgttaataagatgcgctgggctcaatgtcttaataagaagtgtaagaggactatctccgaatttgttttgtttattaacatccgttgatggaagtaaaagatctataatgtctacattcttgactgttttagagcatacaatatggagaggtgtatttccatcatgatctggttttgagggactaattcctagtttcatcatccatgagattgtagaagcttttggattgtctgacataagatgtctatgaatatgatttttgccaaatttatccactatcctggcttcgaatccgatggacattatttttttaaacactctttctgaaggatctgtacacgccaacaacggaccacatccttcttcatcaaccgagttgttaatcttggctccatactgtaccaataaatttattctctctatgacttcatcatctgttcccgagagataatatagaggcgttttatgctgtttatcacacgcgtttggatctgcgccgtgcgtcagcagcatcgcgactattctattattattaattttagaagctatatgcaatggataatttccatcatcatccgtctcatttggagagtatcctctatgaagaagttcttcgacaaatcgttcatctagtcctttaattccacaatacgcatgtagaatgtgataattatttccagaaggttcgatagcttgtagcatattcctaaatacatctaaatttttactattatatttggcataaagagatagataatactcggccgacataatgttgtccattgtagtataaaaattaatatttctatttctgtatatttgcaacaatttactctctataacaaatatcataacttagttcttttatgtcaagaaggcactggtttagttcatctataaatgtcacgccataactaccacgcatgccatactcagaattatgataaagatatttatccttggggtgtaggtaatggggattaatctttgttggatcagtctctaagttaacacatgtcacacatgatccatttatagttatatcacacgatgatgatttatgaattgattccggaagatcgctatcgtattttgtggttccacaattcatttccatacatgttattgtcacactaatattatgatgaactttatctagccgctgagtggtaaacaacagaacagatagtttattatctttaccaacaccctcagccgctgccacaaatctctgatccgtatccatgatggtcatgtttatttctagtccgtatccagtcaacactatgttagcatttctgtcgatatagctttcactcatatgacactcaccaataatagtagaattaatgtcgtaatttacaccaatagtgagttcggcggcaaagtaccaataccggtaatcttgtcgaggaggacatatagtattcttgtattctaccgaatacccgagagatgcgatacaaaagagcaagactaatttgtaaaccatcttactcaaaatatgtaacaatagtacgatgcaatgagtaagacaataggaaatctatcttatatacacataattattctatcaattttaccaattagttagtgtaatgttaacaaaaatgtgggagaatctaattagtttttctttacacaattgacgtacatgagtctgagttccttgtttttgctaattatttcatccaatttattattcttgacgatatcgagatcttttgtataggagtcaaacttgtattcaacatgcttttctataatcattttagctatttcggcatcatccaatagtacattttccagattagcagaatagatattaatgtcgtatttgaacagagcctgtaacatctcaatgtctttattatctatagccaatttaatgtccggaatgaagagaagggaattattggtgtttgtcgacgtcatatagtcgagcaagagaatcatcatatccacgtgtccattttttatagtgatgtgaatacaactaaggagaatagccagatcaaaagtagatggtatctctgaaagaaagtaggaaacaatacttacatcattaagcatgacggcatgataaaatgaagttttccatccagttttcccatagaacatcagtctccaatttttcttaacaaacagttttaccgtttgcatgttaccactatcaaccgcataatacaatgcggtgtttcccttgtcatcaaattgtgaatcatccagtccactgaatagcaaaatctttactattttggtatcttccaatgtggctgcctgatgtaatggaaattcattctctagaagatttttcaatgctccagcgttcaacaacgtacatactagacgcacgttattatcagctattgcataatacaaggcactatgtccatggacatccgccttaaatgtatctttactagagagaaagcttttcagctgcttagacttccaagtattaattcgtgacagatccatgtctgaaacgagacgctaattagtgtatattttttcattttttataattttgtcatattgcaccagaattaataatatctttaatagatctgattagtagatacatggctatcgcaaaacaacatatacacatttaataaaaataatatttattaagaaaattcagatttcacgtacccatcaatataaataaaataatgattccttacaccgtacccatattaaggagattccaccttacccataaacaatataaatccagtaatatcatgtctgatgatgaacacaaatggtgtattaaattccagtttttcaggagatgatctcgccgtagctaccataatagtagatgcctctgctacagttccttgttcgtcgacatctatctttgcattctgaaacattttataaatatataatgggtccctagtcatatgtttaaacgacgcattatctggattaaacatactaggagccatcatttcggctatcgacttaatatccctcttattttcgatagaaaatttagggagtttaagattgtacactttattccctaattgagacgaccaatagtctaattttgcagccgtgatagaatctgtgaaatgggtcatattatcacctattgccaggtacatactaatattagcatccttatacggaaggcgtaccatgtcatattctttgtcatcgattgtgattgtatttccttgcaatttagtaactacgttcatcatgggaaccgttttcgtaccgtacttattagtaaaactagcattgcgtgttttagtgatatcaaacggatattgccatatacctttaaaatatatagtattaatgattgcccatagagtattattgtcgagcatattagaatctactacattagacataccggatctacgttctactatagaattaattttattaaccgcatctcgtctaaagtttaatctatataggccgaatctatgatattgttgataatacgacggtttaatgcacacagtattatctacgaaactttgataagttagatcagtgtacgtatatttagatgttttcagcttagctaatcctgatattaattctgtaaatgctggacccagatctctttttctcaaatccatagtcttcaataattctattctagtattacctgatgcaggcaatagcgacataaacatagaaaacgaataaccaaacggtgagaagacaatattatcatcttgaatatttttatacgctactataccggcattggtaaatccttgtagacgataggcggacgctgaacacgctaacgatagtatcaataacgcaatcatgattttatggtattaataattaaccttatttttatgttcggtataaaaaaattattgatgtctacacatccttttgtaattgacatctatatatccttttgtataatcaactctaatcactttaacttttacagttttccctaccagtttatccctatattcaacatatctatccatatgcatcttaacactctctgccaagatagcttcagagtgaggatagtcaaaaagataaatatatagagcataatcattctcgtatactctgccctttattacatcacccgcattgggcaacgaataacaaaatgcaagcatcttgttaacgggctcgtaaattgggataaaaattatgtttttattgtcttatatctattttattcaagagaatattcaggaatttctttttccggttgtatctcgtcgcagtatatatcatttgtacattgtttcatattttttaatagtttacaccttttagtaggactagtatcgtacaattcatagctgtattttgaattccaatcacgcataaaaatatcttccaattgttgacgaagacctaatccatcatccggtgtaatattaatagatgctccacatgtatccgtaaagtaatttcctgtccaatttgaggtacctatataggccgttttatcggttaccatatatttggcatggtttaccctagaatacggaatgggaggatcagcatctggtacaataaatagctttacttctatatttatgtttttagattttagcatagcgatagatcttaaaaagtttctcatgataaacgaagatcgttgccagcaactaatcaatagcttaacggatacttgtctgtctatagcggatcttcttaattcatcttctatataaggccaaaacaaaattttacccgccttcgaataaataatagggataaagttcataacagatacataaacgaatttactcgcatttctaatacatgacaataaagcggttaaatcattggttctttccatagtacatagttgttgcggtgcagaagcaataaatacagagtgtggaacgccgcttacgttaatactaagaggatgatctgtattataatacgacggataaaagtttttccaattatatggtagattgttaactccaagataccagtatacctcaaaaatttgagtgagatccgctgccaagttcctattattgaagatcgcaatacccaattccttgacctgagttagtgatctccaatccatgttagcgcttcctaaataaatatgtgtattatcagatatccaaaattttgtatgaagaactcctcctaggatatttgtaatatctatgtatcgtacttcaactccggccatttgtagtctttcaacatcctttaatggtttgttagatttattaacggctactctaactcgtactcctcttttgggtaattgtacaatctcgtttaatattatcgtgccgaaattcgtacccacttcatccgataaactccaataaaaagatgatatatctagtgtttttgtggtattggatagaatttccctccacatgttaaatgtagacaaatatactttatcaaattgcatacctataggaatagtttctgtaatcactgcgattgtattatccggattcattttatttgttaaaagaataatcctatatcacttcactctattaaaaatccaagtttctatttctttcatgactgattttttaacttcatccgtttccttatgaagatgatgtttggcaccttcataaatttttatttctctattacaatttgcatgttgcatgaaataatatgcacctaaaacatcgctaatcttattgtttgttccctggagtatgagagtcgggggggtgttaatcttggaaattatttttctaaccttgttggtagccttcaagacctgactagcaaatccagccttaattttttcatgattgactaatgggtcgtattggtatttataaactttatccatatctctagatactgattctggacatagctttccgactggcgcatttggtgtgatggttcccataagtttggcagctagcagattcagtcttgaaacagcatctgcattaactagaggagacattagaatcattgctgtaaacaagtttggattatcgtaagaggctagctcccatggaatgacccaataagtagatttaatagttaccacgtgctgtaccaaagtcatcaatcatcattttttcaccattacttcttccatgtccaatatgatcatgtgagaatactaaaattcctaacgatgatatgttttcagctagttcgtcataacgtccagaatgtttaccagctccatgacttatgaatactaatgccttaggatatgtaataggtttccaatatttacaatatatgtaatcattgtccagattgaacatacagtttgcactcatgattcacgttatataactatcaatattaacagttcgtttgatgatcatattatttttatgttttattgataattgtaaaaacatacaattaaatcaatatagaggaaggagacggctactgtcttttgtaagatagtcatggcgactaaattagattatgaggatgctgttttttactttgtggatgatgataaaatatgtagtcgcgactccatcatcgatctaatagatgaatatattacgtggagaaatcatgttatagtgtttaacaaagatattaccagttgtggaagactgtacaaggaattgatgaagttcgatgatgtcgctatacggtactatggtattgataaaattaatgagattgtcgaagctatgagcgaaggagaccactacatcaattttacaaaagtccatgatcaggaaagtttattcgctaccataggaatatgtgctaaaatcactgaacattggggatacaaaaagatttcagaatctagattccaatcattgggaaacattacagatttgatgaccgacgataatataaacatcttgatactttttctagaaaaaaaattgaattgatgatataggggtcttcataacgcataattattacgttagcattctatatccgtgttaaaaaaaattatcctatcatgtatttgagagttttatatgtagcaaacatgatagctgtgatgccaataagctttagatattcacgcgtgctagtgttagggatggtattatctggtggtgaaatgtccgttatataatctacaaaacaatcatcgcatatagtatgcgatagtagagtaaacatttttatagtttttactggattcatacatcgtctacccaattcggttataaatgaaattgtcgccaatcttacacccaaccccttgttatccattagcatagtattaacttcgttatttatgtcataaactgtaaatgattttgtagatgccatatcatacatgatattcatgtccctattataatcattactaactttatcacaatatatgttgataatatctatatatgatctagtctttgtgggcaactgtctatacaagtcgtctaaacgttgtttactcatatagtatctaacagccatcattacatggtcccgttccgttgatagataatcgagtatgttagtggacttgtcaaatctatataccatattttctggaagtggatatacatagtcgtgatcaacattattgctagcctcatcttctatatcctgtactataccattatctatatcatctacataatctatgatattattacacataaacatcgacaacatactattgtttattatctaagtcctgttgatccaaacccttgatctcctctatttgtactatctagagattgtacttcttccagttctggataatatatacgttgatagattagctgagctattctatctccagtatttacattaaacgtacattttccattattaataagaatgactcctatgtttcccctataatcttcgtctattacaccacctcctatatcaatgccttttagtgacagaccagacctaggagctattctaccatagcagaacttaggcatggacatactaatatctgtcttaattaactgtctttctcctggagggatagtataatcgtaagcgctatacaaatcatatccggcagcacccggcgattgcctagtaggagatttagctctgttagtttccttaacaaatctaactggtgagttaatattcatgttgaacataaaactaatattttatttcaaaattatttaccatcccatatattccatgaataagtgtgatgattgtacacttctatagtatctatatacgatccacgataaaatcctcctatcaatagcagtttattatccactatgatcaattctggattatccctcggataaataggatcatctatcagagtccatgtattgctggattcacaataaaattccgcatttctaccaaccaagaataaccttctaccgaacactaacgcgcatgatttataatgaggataataagtggatggtccaaactgccactgatcatgattgggtagcaaatattctgtagttgtatcagtttcagaatgtcctcccattacgtatataacattgtttatggatgccactgctggattacatctaggtttcagaagactcggcatattaacccaagcagcatccccgtggaaccaacgctcaacagatgtgggatttggtagacctcctactacgtataatttattgttagcgggtatcccgctagcatacagtctggggctattcatcggaggaattggaatccaattgtttgatatataatttaccgctatagcattgttatgtatttcattgttcatccatccaccgatgagatatactacttctccaacatgagtacttgtacacatatggaatatatctataatttgatccatgttcataggatactctatgaatggatacttgtatgatttgcgtggttgtttatcacaatgaaatattttggtacagtctagtatccattttacattatttatacctctgggagaaagataatttgacctgattacatttttgataaggagtagcagatttcctaatttatttcttcgctttatataccacttaatgacaaaatcaactacataatcctcatctggaacatttagttcatcgctttctagaataagtttcatagatagataatcaaaattgtctatgatgtcatcttccagttccaaaaagtgtttggcaataaagtttttagtatgacataagagattggatagtccgtattctatacccatcatgtaacactcgacacaatattcctttctaaaatctcgtaagataaagtttatacaagtgtagatgataaattctacagaggttaatatagaagcacgtaataaattgacgacgttatgactatctatatatacctttccagtatacgagtaaataactatagaagttaaactgtgaatgtcaaggtctagacaaaccctcgtaactggatctttatttttcgtgtatttttgacgtaaatgtgtgcgaaagtaaggagataactttttcaatatcgtagaattgactattatattgcctcctatggcatcaataattgttttgaatttcttagtcatagacaatgctaatatattcttacagtacacagtattgacaaatatcggcatttatgtttctttaaaagtcaacatctagagaaaaatgattatctttttgagacataactcccattttttggtattcacccacacgtttttcgaaaaaattagtttttccttccaatgatatattttccatgaaatcaaacggattggtaacattataaatttttttaaatcccaattcagaaatcaatctatccgcgacgaattctatatatgttttcatcatttcacaattcattcctataagtttaactggaagagccgcagtaagaaattcttgttcaatggatactgcatctgttataatagatctaacggtttcttcactcggtggatgcaataaatgtttaaacatcaaacatgcgaaatcgcagtgcagaccctcgtctctactaattagttcgttggaaaacgtgagtccgggcattaggccacgctttttaagccaaaatatggaagcgaatgatccggaaaagaagattccttctactgcagcaaaggcaataagtctctctccataaccggcgctgtcatgtatccacttttgagcccaatcggccttcttttttacacaaggcatcgtttctatggcattaaagagatagtttttttcattactatctttaacataagtatcgatcaaaagactatacatttccgaatgaatgttttcaatggccatctgaaatccgtagaaacatctagcctcggtaatctgtacttctgtacaaaatcgttccgccaaattttcattcactattccgtcactggctgcaaaaaacgccaatacatgttttataaaatatttttcgtctggtgttagtttattccaatcattgatatctttagatatatctacttcttccactgtccaaaatgatgcctctgcctttttatacatgttccagatgtcatgatattggattgggaaaataacaaatctatttggatttggtgcaaggatgggttccataactaaattaacaataacaataaattttttttcagttatctatatgcctgtacttggattttttgtacatcgatatcgccgcaatcactacaataattacaagtattattgatagcattgttattagtactatcataattaaattatctacattcatgggtgctgaataatcgttattatcatcattatcattttgtaattgtgacatcatactagataaatcgtttgcgagattgttgtgggaagcgggcatggaggatgcattatcattattatttaacgccttccatttggattcacaaatgttacgcacattcaacattttatggaaactataattttgtgaaaacaaataacaagaaaactcgtcatcgttcaaatttttaacgatagtaaaccgattaaacgtcgagctaatttctaacgctagcgactctgttggatatgggtttccagatatatatcttttcagttcccctacgtatctataatcatctgtaggaaatggaagatatttccatttatctactgttcctaatatcatatgtggtggtgtagtagaaccattaagcgcgaaagatgttatttcgcatcgtattttaacttcgcaataatttctggttagataacgcactctaccagtcaagtcaatgatattagcctttacagatatattcatagtagtcgtaacgatgactccatcttttagatgcgatactcctttgtatgtaccagaatcttcgtacctcaaactcgatatatttaaacaagttaatgagatattaacgcgttttatgaatgatgatatataaccagaagttttatcctcggtggctagcgctataaccttatcattataataccaactagtgtgattaatatgtgacacgtcagtgtgggtacaaatatgtacattatcgtctacgtcgtattcgatacatccgcatacagccaacaaatataaaatgacaaatactctaacgacgttcgtacccatcttgatgcggtttaataaatgttttgatttcaatttattgtaaaaaaagattcggttttatactgttcgatattctcattgcttatattttcatctatcatctccacacagtcaaatccgtggttagcatgcacctcatcaaccggtaaaagactatcggactcttctatcattataactctagaatatttaatttggtcattattaatcaagtcaattatcttatttttaacaaacgtgagtattttactcatttttataaaaacttttagaaatatacagactctatcgtgtgtctatatcttctttttatatccaatgtatttatgtctgatttttcttcatttatcatatataatggtccaaattctacacgtgcttcggattcatccagatcattaaggttcttataattgtaacatccttctcttccctcttctacatcttccttcttattcttattcttagcgtcacagaatctaccacagcaggatcccatgacgagcgtcatattaaactaatccattttcaattataatatatgattagtaatgaccattaaaataaaaaatattcttcataaccggcaagaaagtgaaaagttcacattgaaactatgtcagtagtatacatcatgaaatgatgatatatatactctattttggtggaggattatatgatataattcgtggataatcatttttaagacacatttctttattcgtaaatcttttcacgttaaatgagtgtccatattttgcaatttcttcatatgatggcggtgtacgtggacgaggctgctcctgttcttgttgtagtcgccgactgtcgtgtctgcgtttagatccctccattatcgcgattgcgtagatggagtactattttataccttgtaattaaatttttttattaattaaacgtataaaaacgttccgtatctgtatttaagagccagatttcgtctaatagaacaaatagctacagtaaaaataactagaataattgctacacccactagaaaccacggatcgtaatacggcaatcggttttcgataataggtggaacgtatattttatttaaggacttaacaattgtctgtaaaccacaatttgcttccgcggatcctgtattaactatctgtaaaagcatatgttgaccgggcggagccgaacattctccgatatctaatttctgtatatctataatattattaacctccgcatacgcattacagttcttttctagcttggataccgcactaggtacatcgtctagatctattcctatttcctcagcgatagctcttctatccttttccggaagcaatgaaatcacttcaataaatgattcaaccatgagtgtgaaactaagtcgagaattactcatgcatttgttagttattcggagcgcgcaatttttaaactgtcctataacctctcctatatgaatagcacaagtgacattagtagggatagaatgttgagctaatttttgtaaataactatctataaaaagattatacaaagttttaaactctttagtttccgccatttatccagtctgagaaaatgtctctcataataaatttttccaagaaactaattgggtgaagaatggaaacctttaatctatatttatcacagtctgttttggtacacatgatgaattcttccaatgccgtactaaattcgatatctttttcgatttctggatatgtttttaataaagtatgaacaaagaaatggaaatcgtaataccagttatgtttaactttgaaattgttttttattttcttgttaatgattccagccacttgggaaaagtcaaagtcgtttaatgccgatttaatacgttcattaaaaacaaactttttatcctttagatgaattattattggttcattggaatcaaaaagtaagatattatcgggtttaagatctgcgtgtaaaaagttgtcgcaacagggtagttcgtagattttaatgtataacagagccatctgtaaaaagataaactttatgtattgtaccaaagatttaaatcctaatttgatagctaactcggtatctactttatctgccgaatacagtgctaggggaaaaattataatgtttcctctttcatattcgtagttagttctcttttcatgttcgaaaaagtgaaacatgcggttaaaatagtttataacattaatattactgttaataactgccggataaaagtgggatagtaatttcacgaatttgatactgtcctttctctcgttaaacgcctttaaaaaaactttagaagaatatctcaatgagagttcctgaccatccatagtttgtatcaataatagcaacatatgaagaacacgtttatacagagtatgtaaaaatgttaatttatagtttaatcccatggcccacgcacacacgattaattttttttcatctccctttagattgttgtatagaaatttgggtactgtgaactccgccgtagtttccatgggactatataattttgtggcctcgaatacaaattttactacatagttatctatcttaaagactataccatatcctcctgtagatatgtgataaaaatcgtcgtttataggataaaatcgtttatccttttgttggaaaaaggatgaattaatgtaatcattctcttctatctttagtagtgtttccttattaaaattcttaaaataatttaacaatctaactgacggagcccaattttggtgtaaatctaattgggacattatattgttaaaatacaaacagtctcctaatataacagtatctgataatctatggggagacatccattgatattcaggggatgaatcattggcaacacccatttattgtacaaaaagccccaatttacaaacgaaagtccaggtttgatagagacaaacaattaactattttgtctctgtttttaacacctccacagtttttaatttctttagtaatgaaattattcacaatatcagtatcttctttatctaccagagattttactaacttgataaccttggctgtctcattcaatagggtagtaatatttgtatgtgtgatattgatatctttttgaattgtttcttttagaagtgattctttgatggtgccagcatacgaattacaataatgcagaaactcggttaacatgcaggaattatagtaagccaattccaattgttgcctgtgttgtattagagtgtcaatatgagcaatggtgtccttgcgtttctctgatagaatgcgagcagcgattttggcgttatcatttgacgatatttctggaatgacgaatcctgtttctactaactttttggtaggacaaagtgaaacaatcaagaagatagcttctcctcctatttgtggaagaaattgaactcctctagatgatctactgacgatagtatctccttgacagatattggaccgaattacagaagtacctggaatgtaaagccctgaaaccccctcattttttaagcagattgttgccgtaaatcctgcactatgcccaagatagagagctcctttggtgaatccatctctatgtttcagtttaaccaagaaacagtcagctggtctaaaatttccatctctatctaatacagcatctaacttgatgtcaggaactatgaccggtttaatgttatatgtaacattgagtaaatccttaagttcataatcatcactgtcatcagttatgtacgatccaaacaatgtttctaccggcatagtggatacgaagatgctatccatcagaatgtttccctgattagtattttctatatagctattcttctttaaacgattttccaaatcagtaactatgttcatttttttaggagtaggacgcctagccagtatggaagaggattttctagatcctctcttcaacatctttgatctcgatggaatgcaaaaccccatagtgaaacaaccaacgataaaaataatattgtttttcactttttataattttaccatctgactcatggattcattaatatctttataagagctactaacgtataattctttataactgaactgagatatatacaccggatctatggtttccataattgagtaaatgaatgctcggcaataactaatggcaaatgtatagaacaacgaaattatactagagttgttaaagttaatattttctatgagctgttccaataaattatttgttgtgactgcgttcaagtcataaatcatcttgatactatccagtaaaccgtttttaagttctggaatattatcatcccattgtaaagcccctaattcgactatcgaatatcctgctctgatagcagtttcaatatcgacggacgtcaatactgtaataaaggtggtagtattgtcatcatcgtgataaactacgggaatatggtcgttagtaggtacggtaactttacacaacgcgatatataactttccttttgtaccatttttaacgtagttgggacgtcctgcagggtattgttttgaagaaatgatatcgagaacagatttgatacgatatttgttggattcctgattattcactataatataatctagacagatagatgattcgataaatagagaaggtatatcgttggtaggataatacatccccattccagtattctcggatactctattgatgacactagttaagaacatgtcttctattctagaaaacgaaaacatcctacatggactcattaaaacttctaacgctcctgattgtgtctcgaatgcctcgtacaaggatttcaaggatgccatagattctttgaccaacgatttagaattgcgtttagcatctgatttttttattaaatcgaatggtcggctctctggtttgctaccccaatgataacaatagtcttgtaaagataaaccgcaagaaaatttatacgcatccatccaaataaccctagcaccatcggatgatattaatgtattattatagattttccatccacagttattgggccagtatactgttagcaacggtatatcgaatagattactcatgtaacctactagaatgatagttcgtgtactagtcataatatctttaatccaatctaagaaatttaaaattagattttttacactgttaaagttaacaaaagtattacccgggtacgtggatatcatatatggcattggtccattatcagtaatagctccataaactgatacggcgatggtttttatatgtgtttgatctaacgaggaagaaattcgcgcccacaattcatctctagatatgtatttaatatcaaacggtaacacatcaatttcgggacgcgtatatgtttctaaatttttaatccaaatataatgatgacctatatgccctattatcatactgtcaactatagtacacctagggaacttacgatacatctgtttcctataatcgttaaattttacaaatctataacatgctaaaccttttgacgacaaccattcattaatttctgatatggaatctgtattctcgataccgtatcgttctaaagccagtgctatatctccctgttcgtgggaacgctttcgtataatatcgatcaacggataatctgaagtttttggagaataatatgactcatgatctatttcgtccataaacaatctagacataggaattggaggcgatgatcttaattttgtgcaatgagtcgtcaatcctataacttctaatcttgtaatattcatcatcgacataatactatctatgttatcatcgtatattagtataccatgaccttcttcatttcgtgccaaaatgatatacagtcttaaataattacgcaatatctcaatagtttcataattgttagctgttttcatcaaggtttgtatcctgtttaacatgatggcgttctataacgtctctattttctatttttaattttttaaatttttaacgatttactgtggctagatacccaatctctctcaaatatttttttagcctcgcttacaagctgtttatctatactattaaaactgacgaatccgtgattttggtaatgggttccgtcgaaatttgccgaagtgatatgaacatattcgtcgtcgactatcaacaattttgtattattctgaatagtgaaaaccttcacagatagatcattttgaacacacaacgcatctagacttttggcggttgccatagaatatacgtcgttcttatcccaattaccaactagaagtctgatcttaactcctctattaatggctgcttctataatggagttgtaaatgtcgggccaatagtagctattaccgtcgacacgtgtagtgggaactatggccaaatgttcaatatctatactagtcttagctgacctgagtttatcaataactacatcggtatctagatctctagaatatcccaataggtgttccggagaatcagtaaagaacactccacctataggattcttaatatgatacgcagtgctaactggcaaacaacaagccgcagagcataaattcaaccatgaattttttgcgctattaaaggctttaaaagtatcaaatcttctacgaagatctgtggccagcgggggataatcagaatatacacctaacgttttaatcgtatgtatagatcctccagtaaatgacgcgtttcctacataacatctttcatcatctgacacccaaaaacaaccgagtagtagtcccacattattttttttatctatattaacggttataaaatttatatccgggcagtgactttgtagctctcccagatttcttttccctcgttcatctagcaaaactattattttaatccctttttcagatgcctcttttagtttatcaaaaataagcgctcccctagtcgtactcagaggattacaacaaaaagatgctatgtatatatatttcttagctagagtgataatttcgttaaaacattcaaatgttgttaaatgatcggatctaaaatccatattttctggtagtgtttctaccagcctacattttgctcccgcaggtaccgatgcaaatggccacatttagttaacataaaaacttatacatcctgttctatcaacgattctagaatatcatcggctatatcgctaaaattttcatcaaagtcgacatcacaacctaactcagtcaatatattaagaagttccatgatgtcatcttcgtctatttctatatccgtatccattgtagattgttgaccgattatcgagtttaaatcattactaatactcaatccttcagaatacaatctgtgtttcattgtaaatttataggcggtgtatttaagttggtagattttcaattatgtattaatatagcaacagtagttcttgctcctccttgattctagcatcctcttcattattttcttctacgtacataaacatgtccaatacgttagacaacacaccgacgatggcggccgctacagacacgaatatgactaaaccgatgaccatttaaaaacccctctctagctttcacttaaactgtatcgatcattcttttagcacatgtataatataaaaacattattctatttcgaatttaggcttccaaaaatttttcatccgtaaaccgataataatatatatagacttgttaatagtcggaataaatagattaatgcttaaactatcatcatctccacgattagagatacaatatttacattctttttgctgtttcgaaactttatcaatacacgttaatacaaacccaggaaggagatattgaaactgaggctgttgaaaatgaaacggtgaatacaataattcagataatgtaaaatcatgattccgtattctgatgatattagaactgctaatggatgtcgatggtatgtatctaggagtatctattttaacaaagcatcgatttgctaatatacaattatccttttgattaattgttattttattcatattcttaaaaggtttcatatttatcaattcttctacattaaaaatttccatttttaatttatgtagccccgcaatactcctcattacgtttcattttttgtctataatatccattttgttcatctcggtacatagattatccaattgagaagcgcatttagtagttttgtacattttaagtttattgacgaatcgtcgaaaactagttatagttaacattttattatttgataccctgatattaatacccctgccgttactattatttataactgatgtaatccacgtaacattggaattaactatcgatagtaatgcatcgacgcttccaaaattgtctattataaactcaccgataatttttttattgcatgttttcatattcattaggattatcaaatctttaatcttattacgattgtatgcgttgatattacaagacgtcattctaaaagacggaggatctccatcaaatgccagacaatcacgtacaaagtacatggaaataggttttgttctattgcgcatcatagatttatatagaacacccgtagaaatactaatttgttttactctataaaatactaatgcatctatttcatcgttttgtataacgtctttccaagtgtcaaattccaaatttttttcattgatagtaccaaattcttctatctctttaactacttgcatagataggtaattacagtgatgcctacatgccgttttttgaaactgaatagatgcgtctagaagcgatgctacgctagtcacaatcaccactttcatatttagaatatatatatgtaaaaatatagtagaatttcattttgtttttttctatgctataaatgaattctcattttgcatctgctcatactccgttttatattaataccaaagaaggaagatatctggttctaaaagccgttaaagtatgcgatgttagaactgtagaatgcgaaggaagtaaagcttcctgcgtactcaaagtagataaaccctcatcgcccgcgtgtgagagaagaccttcgtccccgtccagatgcgagagaatgaataaccctggaaaacaagttccgtttatgaggacggacatgctacaaaatatgttcgcggctaatcgcgataatgtagcttctagacttttgtcctaaaatactattatatccttttcgatattaataaatccgtgtcgtccaggttttttatctctttcagtatgtgaatagataggtattttatctctattcatcatcgaatttaagagatccgataaacattgtttgtattctccagatgtcagcatctgatacaacaatatatgtgcacataaacctctggcacttatttcatgtaccttccccttatcactaaggagaatagtatttgagaaatatgtatacatgatattatcatgaattagatatacagaatttgtaacactctcgaaatcacacgatgtgtcggcgttaagatctaatatatcactcgataacacattttcatctagatacactagacattttttaaagctaaaatagtctttagtagtaacagtaactatgcgattattttcatcgatgatacatttcatcggcatattattacgcttaccatcaaagactataccatgtgtatatctaacgtattctagcatggttgccatacgcgcattaaacttttcaggatctttggatagatcttccaatctatctatttgagaaaacatttttatcatgttcaatagttgaaacgtcggatccactatatagatattatctataaagattttaggaactacgttcatggtatcctggcgaatattaaaactatcaatgatatgattatcgttttcatcttttatcaccatatagtttctaagatatgggattttacttaatataatattatttcccgtgataaattttattagaaaggccaaatctataagaaaagtcctagaattagtctgaagaatatctatatcgccgtatagtatatttggattaattagatatagagaatatgatccgtaacatatacaacttttattatggcgtctaagatattcttccatcaacttattaacatttttgactagggaagatacattatgacgtcccattacttttgccttgtctattactgcgacgttcatagaatttagcatatctcttgccaattcttccattgatgttacattataagaaattttagatgaaattacatttggagctttaatagtaagaactcctaatatgtccgtgtatgtggtcactaatacagattgtagttctataatcgtaaataatttacctatattatatgtttgagtctgtttagaaaagtagctaagtatacgatcttttatttctgatgcagatgtatcaacatcggaaaaaaatctttttttattcttttttactaaagatacaaatatgtctttgttaaaaacagttattttctgaatatttctagcttgtaattttaacatatgatattcgttcacactaggtactctgcctaaataggtttctataatctttaatgtaatattaggaagagtattctgatcaggattcctattcattttgaggatttaaaactctgattattgtctaatatggtctctacgcaaactttttcacagagcgatagagtttttgataactcgtttttcttaagaaatataaaactactgtctccagagctcgctctatcttttattttatctaattcgatacaaactcctgatactggttcagaaagtaattcattaattttcagtcctttatagaagatatttaatatagataatacaaaatcttcagtttttgatatcgatctgattgatcctagaactagatatattaataacgtgctcattaggcagtttatggcagcttgataattagatatagtatattccagttcatatttattagataccgcattgcccagattttgatattctatgaattcctctgaaaataaatccaaaataactagacattctattttttgtggattagtgtactctcttccctctatcatgttcactactggtgtccacgatgataaatatctagagggaatataatatagtccataggatgccaatctagcaatgtcgaataactgtaattttattcttcgctcttcattatgaattgattcttgaggtataaacctaacacaaattatattattagacttttcgtatgtaatgtctttcatgttataagtttttaatcctggaatagaatctattttaatgaggcttttaaacgcagagttctccaacgagtcaaagcataatactctgttgtttttcttatatacgatgttacgattttcttctttgaatggaataggtttttgaattagtttataattacaacataatagataaggaagtgtgcaaatagtacgcggaaaaaacataatagctcccctgttttcatccatggttttaagtaaatgatcactggcttctttagtcaatggatattcgaacattaaccgtttcatcatcattggacagaatccatatttcttaatgtaaagagtgatcaaatcattgtgtttattgtaccatcttgttgtaaatgtgtattcggttatcggatctgctcctttttctattaaagtatcgatgtcaatctcgtctaagaattcaactatatcgacatatttcatttgtatacacataaccattactaacgtagaatgtataggaagagatgtaacgggaacagggtttgttgattcgcaaactattctaatacataattcttctgttaatacgtcttgcacgtaatctattatagatgccaagatatctatataattattttgtaagatgatgttaactatgtgatctatataagtagtgtaataattcatgtattttgatatatgttccaactctgtctttgtgatgtctagtttcgtaatatctatagcatcctcaaaaaatatattcgcatatattcccaagtcttcagttctatcttctaaaaaatcttcaacgtatggaatataataatctattttacctcttctgatatcattaatgatatagtttttgacactatcttctgtcaattgattcttattcactatatctaagaaacggatagcgtccctaggacgaactactgccattaatatctctattatagcttctggacataattcatctattataccagaattaatgggaactattccgtatctatctaacatagttttaagaaagtcagaatctaagacttgatgttcatatattggttcatacatgaaatgatctctattgatgatagtgactatttcattctctgaaaattggtaactcattctatatatgctttccttgttgatgaaggatagaatatactcaatagaatttgtaccaacaaactgttctcttatgaatcgtatatcatcatctgaaataatcatgtaaggcatacatttaacaattagagacttgtctcctgttatcaatatactattcttgtgataatttatgtgtgaggcaaatttgtccacgttctttaattttgttatagtagatatcaaatccaatggagctacagttcttggcttaaacagatatagtttttctggaacaaattctacaacattattataaaggactttgggtaaataagtgggatgaaatcctattttaattaatgcgatagccttgtcctcgtgcagatatccaaacgcttttgtgatagtatggcattcattgtctagaaacgctctacgaatatctgtgacagatatcatctttagagaatatactagtcgcgttaatagtactacaatttgtattttttaatctatctcaataaaaaaattaatatgtatgattcaatgtataactaaactactaactgttattgataactagaatcagaatctaatgatgacgtacccaagaagtttatctactgccaatttagctgcattatttttagcatctcgtttagattttccatctgccttatcgaatactcttccgtcgatatctacacaggcataaaatgtaggagagttactaggcccaactgattcaatacgaaaagaccaatctctcttagttatttggcagtactcattaataacggtgacagggttagcatctttccaatcaataatttttttagccggaataacatcatcaaaagacttatgatcctctctcattgatttttcgcgggatacatcatctattatgacgtcagccataacatcagcatccggcttatccgcctccgttgtcataaaccaacgaggaggaatatcgtcggagctgtacaccatagcactacgttgaagatcgtacagagctttattaacttctcgcttctccatattaagttgtctagttagttgtgcagcagtagctccttcgattccaatggttttaatagcctcacacacaatctctgcgttagaacgttcgtcgatatagattttagacatttttagagagaactaacacaaccagcaataaaactgaacctactttatcatttttttattcatcatcctctggtggttcgtcgttcctatcaaatgtagctctgattaacccgtcatctataggtgatgctggttctggagattctggaggagatggattattatctggaagaatctctgttatttccttgttttcatgtatcgattgcgttgtaacattaagattgcgaaatgctctaaatttgggaggcttaaagtgttgtttgcaatctctacacgcgtgtctaactagtggaggttcgtcagctgctctagtttgaatcatcatcggcgtagtattcctacttttacagttaggacacggtgtattgtatttctcgtcgagaacgttaaaataatcgttgtaactcacatcctttattttatctatattgtattctactcctttcttaatgcattttataccgaataagagatagcgaaggaattctttttcggtgccgctagtacccttaatcatatcacatagtgttttatattccaaatttgtggcaatagacggtttatttctatacgatagtttgtttctggaatcctttgagtattctataccaatattattctttgattcgaatttagtttcttcgatattagattttgtattacctatattcttgatgtagtactttgatgatttttccatggcccattctattaagtcttccaagttggcatcatccacatattgtgatagtaattctcggatatcagtagcggctaccgccattgatgtttgttcattggatgagtaactactaatgtatacattttccatttataacacttatgtattaactttgttcatttatattttttcattattatgttgatattaacaaaagtgaatatatatatatgttaataattgtattgtggttatacggctacaattttataatgagtgaaagtcagtgtccgatgatcaatgacgatagctttactctgaaaagaaagtatcaaatcgatagtgcggagtcaacaataaaaatggataagaagaggataaagtttcagaatagagccaaaatggtaaaagaaataaatcagacaataagagcagcacaaactcattacgagacattgaaactaggatacataaaatttaagagaatgattaggactactactctagaagatatagcaccatctattccaaataatcagaaaacttataaactattctcggacatttcagccatcggcaaagcatcacagaatccgagtaagatggtatatgctctgctgctttacatgtttcccaatttgtttggagatgatcatagattcattcgttatagaatgcatccaatgagtaaaatcaaacacaagatcttctctcctttcaaacttaatcttattagaatattagtggaagaaagattctataataatgaatgcagatctaataaatggaaaataattggaacacaagttgataaaatgttgatagctgaatctgataaatatacaatagatgcaaggtataacctaaaacccatgtatagaatcaagggagaatctgaagaagataccctcttcatcaaacagatggtagaacaatgtgtgacatcccaggaattggtggaaaaagtgttgaagatactgtttagagatttgttcaagagtggagaatacaaagcgtacagatacgatgatgatgtagaaaatggattcattggattggatacactaaaattaaacattgttcatgatatagttgaaccatgtatgcctgttcgtaggccagtggctaagatactgtgtaaagaaatggtaaataaatactttgagaatccgctacatattattggtaaaaatcttcaagagtgcattgactttgttagtgaataggcatttcatctttctccaatactaattcaaattgttaaattaataatggatagtataaatagttattagttataagatagtaaaaataattattagaataagagtgtagtatcatagataactctcttctataaaaatggattttattcgtagaaagtatcttatatacacagtagaaaataatatagattttttaaaggatgatacattaagtaaagtaaacaattttaccctcaatcatgtactagctctcaagtatctagttagcaattttcctcaacatgttattactaaggatgtattagctaataccaatttttttgttttcatacatatggtacgatgttgtaaagtgtacgaagcggttttacgacacgcatttgatgcacccacgttgtacgttaaagcattgactaagaattatttatcgtttagtaacgcaatacaatcgtacaaggaaaccgtgcataaactaacacaagatgaaaaatttttagaggttgccgaatacatggacgaattaggagaacttataggcgtaaattatgacttagttcttaatccattatttcacggaggggaacccatcaaagatatggaaatcatttttttaaaactgtttaagaaaacagacttcaaagttgttaaaaaattaagtgttataagattacttatttgggcatacctaagcaagaaagatacaggcatagagtttgcggataatgatagacaagatatatatactctatttcaacaaactggtagaatcgtccatagcaatctaacagaaacgtttagagattatatctttcccggagataagactagctattgggtgtggttaaacgaaagtatagctaatgatgcggatatcgttcttaatagacccgccattaccatgtatgataaaattcttagttatatatactctgagataaaacaaggacgcgttaataaaaacatgcttaagttagtttatatctttgagcctgaaaaagatatcagagaacttctgctagaaatcatatatgatattcctggagatatcctatctattattgatgcaaaaaacgacgattggaaaaaatattttattagtttttataaagctaattttattaacggtaatacatttattagtgatagaacgtttaacgaggacttattcagagttgttgttcaaatagatcccgaatatttcgataatgaacgaattatgtctttattctctacgagtgctgcggacattaaacgatttgatgagttagatattaataacagttatatatctaatataatttatgaggtgaacgatatcacattagatacaatggatgatatgaagaagtgtcaaatctttaacgaggatacgtcgtattatgttaaggaatacaatacatacctgtttttgcacgagtcggatcccatggtcatagagaacggaatactaaagaaactgtcatctataaaatccaagagtagacggctgaacttgtttagcaaaaacattttaaaatattatttagacggacaattggctcgtctaggtcttgtgttagatgattataaaggagacttgttagttaaaatgataaaccatcttaagtctgtggaggatgtatccgcattcgttcgattttctacagataaaaaccctagtattcttccatcgctaatcaaaactattttagctagttataatatttccatcatcgtcttatttcaaaggtttttgagagataatctatatcatgtagaagaattcttggataaaagcatccatctaaccaagacggataagaaatatatacttcaattgataagacacggtagatcatagaacagaccaaatatattattaataatttgtatatacatagatataattatcacacatttttgataaatgggaactgctgcaacaattcagactcccaccaaattaatgaataaagaaaatgcagaaatgattttggaaaaaattgttgatcatatagttatgtatattagtgacgaatcaagtgattcagaaaataatcctgaatatattgattttcgtaacagatacgaagactatagatctctcattataaaaagtgatcacgagtttgtaaagctatgtaaaaatcatgcggagaaaagttctccagaaacgcaacaaatgattatcaaacacatatacgaacaatatcttattccagtatctgaagtactattaaaacctataatgtccatgggtgacataattacatataacggatgtaaagacaatgaatggatgctagaacaactctctaccctaaactttaacaatctccgcacatggaactcatgtagcataggcaatgtaacgcgtctgttttatacattttttagttatctgatgaaagataaactaaatatataagtataatcccattctaatactttaacctgatgtattacctgcatcttattagaatattaacctaactaaaagacataacataaaaactcattacatagttgataaaaagcggtaggatataaatattatggctgccaccgttccgcgttttgacgacgtgtacaaaaatgcacaaagaagaattctagatcaagaaacattttttagtagaggtctaagtagaccgttaatgaaaaacacatatctatttgataattacgcgtatggatggataccagaaactgcaatttggagtagtagatacgcaaacttagatgcaagtgactattatcccatttcgttgggattacttaaaaagttcgagtttctcatgtctctatataaaggtcctattccagtatacgaagaaaaagtaaatactgaattcattgctaatggatctttctccggtagatacgtatcatatcttagaaagttttctgctcttccaacaaacgagtttattagttttttgttactgacttccattccaatctataatatcttgttctggtttaaaaatactcagtttgatattactaaacacacattattcagatacgtctatacagataatgccaaacacctggcgttggctaggtatatgtatcaaacaggagactataagcctttgtttagtcgtctcaaagagaattatatatttaccggtcccgttccaatatgtatcaaagatatagatcaccctaatcttagtagagcaagaagtccatccgattatgagacattagctaatattagtactatattgtactttaccaagtatgatccggtattaatgtttttattgttttacgtacctgggtattcaattactacaaaaattactccagccgtagaatatctaatggataaactgaatctaacaaagagcgacgtacaactgttgtaaattattttatgcttcgtaaaatgtaggttttgaaccaaacattctttcaaagaatgagatgcataaaactttattatccaatagattgactatttcggacgtcaatcgtttaaagtaaacttcgtaaaatattctttgatcactgccgagtttaaaacttctatcgataattgtttcatatgttttaatatttacaagttttttggtccatggtccattaggacaaatatatgcaaaataatatcgttctccaagttctatagtctctggattatttttattatattcagtaaccaaatacatattagggttatctgcggatttataatttgagtgatgcattcgactcaacataaataattctagaggagacgatctactatcaaattcggatcgtaaatctgtttctaaagaacggagaatatctatacatacctgattagaattcatccgtccttcagacaacatctcagacagtctggttttgtacatcttaatcatattcttatgaaacttggaaacatctcttctagtttcactagtacctttattaattctctcaggtacagattttgaattcgacgatgccgagtatttcatcgttgtatatttcttcttcgattgcataatcagattcttatataccgcctcaaactctattttaaaattattaaacaatactctattattaatcagtcgttctaactctttcgctatttctatagacttatctacatcttgactgtctatctctgtaaacacggagtcggtatctccatacacgctacgaaaacgaaatctgtaatctataggcaacgatgttttcacaatcggattaatatctctatcgtccatataaaatggattacttaatggattggcaaaccgtaacataccgttagataactctgctccatttagtaccgattctagatacaagatcattctacgtcctatggatgtgcaactcttagccgaagcgtatgagtatagagcactatttctaaatcccatcagaccatatactgagttggctactatcttgtacgtatattgcatggaatcatagatggccttttcagttgaactggtagcctgttttagcatctttttatatctggctctctctgccaaaaatgttcttaatagtctaggaatggttccttctatcgatctatcgaaaattgctatttcagagatgaggttcggtagtctaggttcacaatgaaccgtaatatatctaggaggtggatatttctgaagcaatagctgattatttatttcttcttccaatctattggtactaacaacgacaccgactaatgtttccggagatagatttccaaagatacacacattaggatacagactgttataatcaaagattaatacattattactaaacattttttgttttggagcaaataccttaccgccttcataaggaaacttttgttttgtttctgatctaactaagatagttttagtttccaacaatagctttaacagtggacccttgatgactgtactcgctctatattcgaataccatggattgaggaagcacatatgttgacgcacccgcgtctgtttttgtttctactccataatactcccacaaatactgacacaaacaagcatcatgaatacagtatctagccatatctaaagctatgtttagattataatccttatacatctgagctaaatcaacgtcatcctttccgaaagataatttatatgtatcattaggtaaagtaggacataatagtacgactttaaatccattttcccaaatatctttacgaattactttacatataatatcctcatcaacagtcacataattacctgtggttaaaacctttgcaaatgcagcggctttgcctttcgcgtctgtagtatcgtcaccgatgaacgtcatttctctaactcctctatttaatactttacccatgcaactgaacgcgttcttggatatagaatccaatttgtacgaatccaatttttcaaatttttgaatgaatgaatatagatcgaaaaatatagttccattattgttattaacgtgaaacgtagtattggccatgccgcctactcccttatgactagactgatttctctcataaatacagagatgtacagcttcctttttgtccggagatctaaagataattttctctcctgttaataactctagacgattagtaatatatctcagatcaaagttatgtccgttaaaggtaacgacgtagtcgaacgttagttccaacaattgtttagctattcgtaacaaaactatttcagaacatagaactagttctcgttcgtaatccatttccattagtgactgtatcctcaaacatcctctatcgacggcttcttgtatttcctgttccgttaacatctcttcattaatgagcgtaaacaataatcgtttaccacttaaatcgatataacagtaacttgtatgcgagattgggttaataaatacagaaggaaacttcttatcgaagtgacactctatatctagaaataagtacgatcttgggatatcgaatctaggtatttttttagcgaaacagttacgtggatcgtcacaatgataacatccattgttaatctttgtcaaatattgctcgtccaacgagtaacatccgtctggagatatcccgttagaaatataaaaccaactaatattgagaaattcatccatggtggcattttgtatgctgcgtttctttggctcttctatcaaccacatatctgcgacggagcattttctatctttaatatctagattataacttattgtctcgtcaatgtctatagttctcatctttcccaacggcctcgcattaaatggaggaggagacaatgactgatatatttcgtccgtcactacgtaataaaagtaatgaggaaatcgtataaatacggtctcaccatttcgacatctggatttcagatataaaaatctgttttcaccgtgactttcaaaccaattaatgcaccgaacatccatttatagaatttagaaatatattttcatttaaatgaatcccaaacattggggaagagccgtatggaccattatttttatagtactttcgcaagcgggtttagacggcaacatagaagcgtgtaaacgaaaactatatactatagttagcactcttccatgtcctgcatgtagacggcacgcgactatcgctatagaggacaataatgtcatgtctagcgatgatctgaattatatttattattttttcatcagattatttaacaatttggcatctgatcccaaatacgcgatcgatgtgacaaaggttaaccctttataaacttaacccattataaaacttatgattagtcacaactgaaataaccgcgtgattattttttggtataattctacacggcatggtttctgtgactatgaattcaacccccgttacattagtgaaatctttaacaaacagcaagggttcgtcaaagacataaaactcattgtttacaatcgaaatagaccccctatcacacttaaaataaaaaatatccttatcctttaccaccaaataaaattctgattggtcaatgtgaatgtattcacttaacagttccacaaatttatttattaactccgaggcacatacatcgtcggtattttttatggcaaactttactcttccagcatccgtttctaaaaaaatattaacgagttccatttatatcatccaatattattgaaatgacgttgatggacagatgatacaaataagaaggtacggtacctttgtccaccatctcctccaattcatgctctattttgtcattaactttaatgtatgaaaacagtacgccacatgcttccatgacagtgtgtaacactttggatacaaaatgtttgacattagtataattgttcaagactgtcaatctataatagatagtagctataatatattctatgatggtattgaagaagatgacaaccttggcatattgatcatttaacacagacatggtatcaacagatagcttgaatgaaagagaatcagtaattggaataagcgtcttctcgatagagtgtccgtataccaacatgtctgatattttgatgtattccattaaattatttagttttttctttttattctcgttaaacagcatttctgtcaacggaccccaacatcgttgaccgattaagttttgattgatttttccgtgtaaggcgtatctagtcagatcgtatagcctatccaataatccatcatctgtgcgtagatcacatcgtacactttttaattctctatagaagagcgacagacatctggagcaattacagacagcaatttctttattctctacagatgtaagatacttgaagacattcctatgatgatgcagaattttggataacacggtattgatggtatctgttaccataattcctttgatggctgatagtgtcagagcacaagatttccaatctttgacaatttttagcaccattatctttgttttgatatctatatcagacagcatggtgcgtctgacaacacagggattaagacggaaagatgaaatgattctctcaacatcttcaatagataccttgctattttttctggcattatctatatgtgcgagaatatcctctagagaatcagtatcctttttgatgatagtggatctcaatgacatgggacgtctaaaccttcttattctatcaccagattgcatggtgatttgtcttctttcttttatcataatgtaatctctaaattcatcggcaaattgtctatatctaaaatcataatatgagatgtttacctctacaaatatctgttcgtccaatgttaaagtatttacatcagttttgtattccaaattaaacatggcaacggatttaattttatattcctctattaagtcctcgtcgataataacagaatgtagataatcatttaatccatcgtacatggttggaagatgcttgttgacaaaatctttaattgtcttgatgaaggtgggactatatctaacatcttgattaataaaatttataacattgtccataggatactttgtaactagttttatacacatctcttcatcggtaagtttagacagaatatcgtgaacaggtggtatattatattcatcagatatacgaagaacaatgtccaaatctatattgtttaatatattatatagatgtagcgtagctcctacaggaatatctttaactaagtcaatgatttcatcaaccgttagatctattttaaagttaatcatataggcattgatttttaaaaggtatgtagccttgactacattctcattaattaaccattccaagtcactgtgtgtaagaagattatattctatcataagcttgactacatttggtcccgataccattaaagaattcttatgatataaggaaacagattttaggtactcatctactctacaagaattttggagagccttaacgatatcagtgacgtttattatttcaggaggaaaaaacctaacattgagaatatcggaattaatagcttccagatacagtgattttggcaatagtccgtgtaatccataatccagtaacacgagctggtgcttgctagacaccttttcaatgtttaatttttttgaaataagctttgataaagccttcctcgcaaattccggatacatgaacatgttggcgacatgattaagtattgttttttcattatttttatattttctcaacaagttctcaataccccaatagatgatagaatatcacccaatgcgtccatgttgtctatttccaacaggtcgctatatccaccaatagaagtttttccaaaaaagattctaggaacagttctaccaccagtaatttgttcaaaatagtcacgcaattcattttcgggtttaaattctttaatatcgacaatttcatacgctcctcttttgaaactaaacttatttagaatatccagtgcatttctacaaaaaggacatgtatacttgacaaaaattgtcactttgttattggccaacctttgttgtacaaattcctcggccattttaatatttaagtgatataaaactatctcgacttatttaactctttagtcgagatatatggacgcagatagctatatgatagccaactacagaaggcaaacgctataaaaaacataattacgacgagcatatttataaatatttttattcagcattacttgatatagtaatattaggcacagtcaaacattcaaccactctcgatacattaactctctcattttctttaacaaattctgcaatatcttcgtaaaaagattcttgaaactttttagaatatctatcgactctagatgaaatagcgttcgtcaacatactatgttttgtatacataaaggcgcccattttaacagtttctagtgacaaaatgctagcgatcctaggatcctttagaatcacatagattgacgattcgtctctcttagtaactctagtaaaataatcatacaatctagtacgcgaaataatattatccttgacttgaggagatctaaacaatctagttttgagaacatcgataagttcatcgggaatgacatacatactatctttaatagaactcttttcatccagttgaatggattcgtccttaaccaactgattaatgagatcttctattttatcattttccagatgatatgtatgtccattaaagttaaattgtgtagcgcttctttttagtctagcagccaatactttaacatcactaatatcgatatacaaaggagatgatttatctatggtattaagaattcgtttttcgacatccgtcaaaaccaattcctttttgcctgtatcatccagttttccatcctttgtaaagaaattattttctactagactattaataagactgataaggattcctccataattgcacaatccaaactttttcacaaaactagactttacaagatctacaggaatgcgtacttcaggttttttagcttgtgattttttcttttgcggacattttcttgtgaccaactcatctaccatttcattgattttagcagtgaaataagctttcaatgcacgggcactgatactattgaaaacgagttgatcttcaaattccgccatttaagttcaccaaacaacttttaaatacaaatatatcaatagtagtagaataagaactataaaaaaataataattaaccaataccaaccccaacaaccggtattattagttgatgtgactgttttctcatcacttagaacagatttaacaatttctataaagtctgtcaaatcatcttccggagaccccataaatacaccaaatatagcggcgtacaacttatccatttatacattgaatattggcttttctttatcgctatcttcatcatattcatcatcaatatcaacaagtcccagattacgagccagatcttcttctacattttcagtcattgatacacgttcactatctccagagagtccgataacgttagccaccacttctctatcaatgattagtttcttgagcgcgaaagtaatttttgtttccgttccggatctatagaagacgataggtgtgataattgccttggccaattgtctttctcttttactgagtgattctagttcaccttctatagatctgagaatggatgattctccagtcgaaacatattctaccatggatccgtttaatttgttgatgaagatggattcatccttaaatgttttctctgtaatagtttccaccgaaagactatgcaaagaatttggaatgcgttccttgtgcttaatgtttccatagacggcttctagaagttgatacaacataggactagccgcggtaacttttatttttagaaagtatccatcgcttctatcttgtttagatttatttttataaagtttagtctctccttccaacataataaaagtggaagtcatttgactagataaactatcagtaagttttatagagatagacgaacaattagcgtattgagaagcatttagtgtaacgtattcgatacattttgcattagatttactaatcgattttgcatactctataacacccgcacaagtctgtagagaatcgctagatgcagtaggtcttggtgaagtttcaactctcttcttgattaccttactcatgattaaacctaaataattgtactttgtaatataatgatatatattttcactttatctcatttgagaataaaaatgtttttgtttaaccactgcatgatgtacagatttcggaatcgcaaaccaccagtggttttattttatccttgtccaatgtgaattgaatgggagcggatgcgggtttcgtacgtagatagtacattcccgtttttagaccgagactccatccgtaaaaatgcatactcgttagtttggaataactcggatctgctatatggatattcatagattgactttgatcgatgaaggctcccctgtctgcagccatttttatgatcgtcttttgtggaatttcccaaatagttttataaactcgcttaatatcttctggaaggtttgtattctgaatggatccaccatctgccataatcctattcttgatctcatcattccataattttctctcggttaaaactctaaggagatgcggattaactacttgaaattctccagacaatactctccgagtgtaaatattactggtatacggttccaccgactcattatttcccaaaatttgagcagttgatgcagtcggcataggtgccaccaataaactatttctaagaccgtatgttctgattttatcttttagaggttcccaattccaaagatccgacggtacaacattccaaagatcatattgtagaataccgttactggcgtacgatcctacatatgtatcgtatggtccttccttctcagctagttcacaactcgcctctaatgcaccgtaataaatggtttcgaagatcttcttatttagatcttgtgcttccaggctatcaaatggataatttaagagaataaacgcgtccgctaatccttgaacaccaataccgataggtctatgtctcttattagagatttcagcttctggaataggataataattaatatctataattttattgagatttctgacaattactttgaccacatccttcagtttgagaaaatcaaatcgcccatctattacaaacatgttcaaggcaacagatgccagattacaaacggctacctcattagcatccgcatattgtattatctcagtgcaaagattactacacttgatagttcctaaattttgttgattactctttttgttacacgcatccttataaagaatgaatggagtaccagtttcaatctgagattctataatcgctttccagacgactcgagcctttattatagatttgtatctcctttctctttcgtatagtgtatacaatcgttcgaactcgtctccccaaacattgtccaatccaggacattcatccggacacatcaacgaccactctccgtcatccttcactcgtttcataaagagatcaggaatccaaagagctataaatagatctctggttctatgttcctcgtttcctgtattctttttaagatcgaggaacgccataatatcagaatgccacggttccaagtatatggccataactccaggccgtttgtttcctccctgatctatgtatctagcggtgttattataaactctcaacattggaataataccgtttgatataccattggtaccggagatatagcttccactggcacgaatattactaattgatagacctattccccctgccattttagagattaatgcgcatcgttttaacgtgtcatagataccctctatgctatcatcgatcatgttaagtagaaaacagctagacatttggtgacgactagttcccgcattaaataaggtaggagaagcgtgcgtaaaccatttttcagaaagtagattgtacgtctcaatagctgagtctatatcccattgatgaattcctactgcgacacgcattaacatgtgctgaggtctttcaacgatcttgttgtttattttcaacaagtaggatttttccaaagttttaaaaccaaaatagttgtatgaaaagtctcgttcgtaaataataaccgagttgagtttatccttatatttgttaactatatccatggtgatacttgaaataatcggagaatgtttcccatttttaggattaacatagttgaataaatcctccatcacttcactaaatagtttttttgtttccttgtgtagatttgatacggctattctggcggctagaatggcataatccggatgttgtgtagtacaagtggctgctatttcggctgccagagtgtccaattctaccgttgttactccattatatattccttgaataaccttcatagctattttaataggatctatatgatccgtgtttaagccataacataattttctaatacgagacgtgattttatcaaacatgacattttccttgtatccatttcgtttaatgacaaacatttttgttggtgtaataaaaaaattatttaacttttcattaatagggatttgacgtatgtagcgtacaaaatgatcgttcctggtatatagataaagagtcctatatatttgaaaatcgttacggctcgattaaactttaatgattgcatagtgaatatatcattaggatttaactccttgactatcatggcggcgccagaaattaccatcaaaagcattaatacagttatgccgatcgcagttaaaacggttatagcatccaccatttatatctaaaaattagatcaaagaatatgtgacaaagtcctagttgtatactgagaattgacgaaacaatgtttcttacatatttttttcttattagtaactgacttaatagtaggaactggaaagctagacttgattattctataagtatagatacccttccagataatgttctctttgataaaagttccagaaaatgtagaattttttaaaaagttatcttttgctattaccaagattgtgtttagacgcttattattaatatgagtgatgaaatccacaccgcctctagatatcgcctttatttccacattagatggtaaatccaatagtgaaactatctttttaggaatgtatggactcgcgtttagaggagtgaacgtcttgggcgtcggaaaggatgattcgtcaaacgaataaacaatttcacaaatggatgttaatgtattagtaggaaattttttgacgctagtggaattgaagattctaatggatgatgttctacctatttcatccgataacatgttaatttccgacaccaacggttttaatatttcgatgatatacggtagtctctctttcggacttatatagcttattccacaatacgagtcattatatactccaaaaaacaaaataactagtataaaatctgtatcgaatgggaaaaacgaaattatcgacataggtatagaatccggaacattgaacgtattaatacttaattctttttctgtggtaagtaccgataggttattgacattgtatggttttaaatattctataacttgagacttgatagatattagtgatgaattgaaaattatttttatcaccacgtgtgtttcaggatcatcgtcgacgcccgtcaaccaaccgaatggagtaaaataaatatcattaatatatgctctagatattagtatttttattaatcctttgattatcatcttctcgtaggcgaatgattccatgatcaagagtgatttgagaacatcctccggagtattaatgggcttagtaaacagtccatcgttgcaataataaaagttatccaagttaaaggatattatgcattcgtttaaagatatcacctcatctgacggagacaattttttggtaggttttagagactttgaagctacttgtttaacaaagttattcatcgtcgtctactattctatttaattttgtagttaatttatcacatatcacattaattgactttttggtccatttttccatacgtttatattcttttaatcctgcgttatccgtttccgttatatccagggatagatcttgcaagttaaatagaatgctcttaaataatgtcattttcttatccgctaaaaatttaaagaatgtataaacctttttcagagatttgaaactcttaggtggtgtcctagtacacaatatcataaacaaactaataaacattccacattcagattccaacagctgattaacttccacattaatacagcctattttcgctccaaatgtacattcgaaaaatctgaataaaacatcgatgtcacaatttgtattatccaatacagaatgtttgtgattcgtgttaaaaccatcggagaaggaatagaaataaaaattattatagtggtggaattcagttggaatattgcctccggagtcataaaaggatactaaacattgttttttatcataaattacacatttccaatgagacaaataacaaaatccaaacattacaaatctagaggtagaacttttaattttgtctttaagtatatacgataagatatgtttattcataaacgcgtcaaatttttcatgaatcgctaaggagtttaagaatctcatgtcaaattgtcctatataatccacttcggatccataagcaaactgagagactaagttcttaatacttcgattgctcatccaggctcctctctcaggctctattttcatcttgacgacctttggattttcaccagtatgtattcctttacgtgataaatcatcgattttcaaatccatttgtgagaagtctatcgccttagatactttttcccgtagtcgaggtttaaaaaaatacgctaacggtatactagtaggtaactcaaagacatcatatatagaatggtaacgcgtctttaactcgtcggttaactctttcttttgatcgagttcgtcgctactattgggtctgctcaggtgccccgactctactagttccaacatcataccgataggaatacaagacactttgccggcggttgtagatttatcatatttttccactacatatccgttacaatttgttaaaaatttagatacatctatattgctacataatccagctagtgaatatatatgacataataaattggtaaatcctagttctggtattttactaattactaaatctgtatatctttccatttatcatggaaaagaatttaccagatatcttcttttttccaaactgcgttaatgtattctcttacaaatattcacaagatgaattcagtaatatgagtaaaacggaacgtgatagtttctcattggccgtgtttccagttataaaacatagatggcataacgcacacgttgtaaaacataaaggaatatacaaagttagtacagaagcacgtggaaaaaaagtatctcctccatcactaggaaaacccgcacacataaacctaaccgcgaagcaatatatatacagtgaacacacaataagctttgaatgttatagttttctaaaatgtataacaaatacagaaatcaattcgttcgatgagtatatattaagaggactattagaagctggtaatagtttacagatattttccaattccgtaggtaaacgaacagatactataggtgtactagggaataagtatccatttagcaaaattccattggcctcattaactcctaaagcacaacgagagatattttcagcgtggatttctcatagacctgtagttttaactggaggaactggagtgggtaagacgtcacaggtacccaagttattgctttggtttaattatttatttggtggattctctactctagataaaatcactgactttcacgaaagaccagtcattctatctcttcctaggatagctttagttagattgcatagcaataccattttaaaatcattgggatttaaggtactagatggatctcctatttctttacggtacggatctataccggaagaattaataaacaaacaaccaaaaaaatatggaattgtattttctacccataagttatctctaacaaaactatttagttatggcactcttattatagacgaagttcatgagcatgatcaaataggagatattattatagcagtagcgagaaagcatcatacgaaaatagattctatgtttttaatgactgccacgttagaggatgacagggaacggctaaaagtatttttacctaatcccgcatttatacatattcctggagatacactgtttaaaattagcgaggtatttattcataataagataaatccatcttccagaatggcatacatagaagaagaaaagagaaatttagttactgctatacagatgtatactcctcctgatggatcatccggtatagtctttgtggcatccgttgcacagtgtcacgaatataaatcatatttagaaaaaagattaccgtatgatatgtatattattcatggtaaggtcttagatatagacgaaatattagaaaaagtgtattcatcacctaatgtatcgataattatttctactccttatttggaatccagcgttactatacgcaatgttacacacatttatgatatgggtagagtttttgtccccgctccttttggaggatcgcaacaatttatttctaaatctatgagagatcaacgaaaaggaagagtaggaagagttaatcctggtacatacgtctatttctatgatctgtcttatatgaagtctatacagcgaatagattcagaatttctacataattatatattgtacgctaataagtttaatctaacactccccgaagatttgtttataatccctacaaatttggatattctatggcgtacaaaggaatatatagactcgttcgatattagtacagaaacatggaataaattattatccaattattatatgaagatgatagagtatgctaaactttatgtactaagtcctattctcgctgaggagttggataactttgagaggacgggagaattaactagtattgtacgagaagccattttatctctaaatttacaaattaagattttaaattttaaacataaagatgatgatacgtatatacacttttgtaaaatattattcggtgtctataacggaacaaacgctactatatattatcatagacctctaacgggatatatgaatatgatttcagatactatatttgttcctgtagataataactaaaaattaaactctaatgaccacatctttttttagagatgaaaaattttccacatctccttttgtagacacgactaaacattttgcagaaaaaagtttattagtgtttagataatcgtatacttcatcagtgtagatagtaaatgtgaacagataaaaggtattcttgctcaatagattggtaaattccatagaatatattaatcctttcttcttgagatcccacatcatttcaaccagagacgttttatccaatgatttacctcgtactataccacatacaaaactagattttgcagtgacgtcgtacctggtattcctaccaaacaaaattttacttttagttcttttagaaaattctaaggtagaatctctatttgccaatatgtcatctatggaattaccactagcaaaaaatgatagaaatatatattgatacatcgcagctggttttgatctactatactttaaaaacgaatcagattccataattgcctgtatatcatcagctgaaaaactatgttttacacgtattccttcggcatttctttttaatgatatatcttgtttagacaatgataaagttatcatgtccatgagagacgcgtctccgtatcgtataaatatttcattagatgttagacgcttcattaggggtatacttctataaggtttcttaatcagtccatcattggttgcgtcaagaactactatcggatgttgttgggtatctctagtgttacacatggccttactaaagtttgggtaaataactatgatatctctattaattatagatgcatatatttcattcgtcaaggatattagtatcgacttgctatcgtcattaatacgtgtaatgtaatcatataaatcatgcgatagccaaggaaaatttaaatagatgttcatcatataatcgtcgctataattcatattaatacgttgacattgactaatttgtaatatagcctcgccacgaagaaagctctcgtattcagtttcatcgataaaggataccgttaaatataactggttgccgatagtctcatagtctattaagtggtaagtttcgtacaaatacagaatccctaaaatattatctaatgttggattaatctttaccataactgtataaaatggagacggagtcataactattttaccgtttgtacttactggaatagatgaaggaataatctccggacatgctggtaaagacccaaatgtctgtttgaagaaatccaatgttccaggtcctaatctcttaacaaaaattacgatattcgatcccgatatcctttgcattctatttaccagcatatcacgaactatattaagattatctatcatgtctattctcccaccgttatataaatcgcctccgctaagaaacgttagtatatccatacaatggaatacttcatttctaaaatagtattcgttttctaattctttaatgtgaaatcgtatactagaaagggaaaaattatctttgagttttccgttagaaaagaaccacgaaactaatgttctgattgcgtccgattccgttgctgaattaatggatttacaccaaaaactcatataacttctagatgtagaagcattcgctaaaaaattagtagaatcaaaggatataagtagatgttccaacaagtgagcaattcccaagatttcatctatatcattctcgaatccgaaattagaaattcccaagtagatatcctttttcatccgatcgttgatgaaaatacgaactttattcggtaagacaatcatttactaaggagtaaaataggaagtaatgttcgtatgtcgttatcatcgtataaattaaaggtgtgttttttaccattaagtgacattataattttaccaatattggaattataatataggtgtatttgcgcactcgcgacggttgatgcatcggtaaatatagctgtatctaatgttctagtcggtatttcatcatttcgctgtctaataatagcgttttctctatctgtttccattacagctgcctgaagtttattggtcggataatatgtaaaataataagaaatacatacgaataacaaaaataaaataagatataataaagatgccatttagagatctaattttgtttaacttgtccaaattcctacttacagaagatgaggaatcgttggagatagtgtcttccttatgtagaggatttgaaatatcttataatgacttgataacttactttccagataggaaataccataaatatatttataaagtatttgaacatgtagatttatcggaggaattaagtatggaattccatgatacaactctgagagatttagtctatcttagattgtacaagtattccaagtgtatacggccgtgttataaattaggagataatctaaaaggcatagttgttataaaggacaggaatatttatattagggaagcaaatgatgacttgatagaatatctcctcaaggaatacactcctcagatttatacatattctaatgagcgcgtccccataactggttcaaaattaattctttgtggattttctcaagttacatttatggcgtatacaacgtcgcatataacaacaaataaaaaggtagatgttctcgtttccaaaaaatgtatagatgaactagtcgatccaataaattatcaaatacttcaaaatttatttgataaaggaagcggaacaataaacaaaatactcaggaagatattttattcggtaacaggtggccaaactccataggtagctttttctatttcggattttagaatttccaaattcaccagcgatttatcggttttggtgaaatccaaggatttattaatgtccacaaatgccatttgttttgtctgtggattgtatttgaaaatggaaacgatgtagttagatagatgcgctgcgaagtttcctattagggttccgcgcttcacgtcacccagcatacttgaatcaccatcctttaaaaaaaatgataagatatcaacatggagtatatcatactcggattttaattcttctactgcatcactgacattttcacaaatactacaatacggtttaccgaaaataatcagtacgttcttcatttatgggtatcaaaaacttaaaatcgttactgctggaaaataaatcactgacgatattagatgataatttatacaaagtatacaatggaatatttgtggatacaatgagtatttatatagccgtcgccaattgtgtcagaaacttagaagagttaactacggtattcataaaatacgtaaacggatgggtaaaaaagggagggcatgtaaccctttttatcgatagaggaagtataaaaattaaacaagacgttagagacaagagacgtaaatattctaaattaaccaaggacagaaaaatgttagaattagaaaagtgtacatccgaaatacaaaatgttaccggatttatggaagaagaaataaaggcagaaatgcaattaaaaatcgataaactcacatttcaaatatatttatctgattctgataacataaaaatatcattgaatgagatactaacacatttcaacaataatgagaatgttacattattttattgtgatgaacgagacgcagaattcgttatgtgtctcgaggctaaaacacatttctctaccacaggagaatggccgttgataataagtaccgatcaggatactatgctatttgcatctgctgataatcatcctaagatgataaaaaacttaactcaactgtttaaatttgttccctcggcagaggataactatttagcaaaattaacggcgttagtgaatggatgtgatttctttcctggactctatggggcatctataacacccaccaacttaaacaaaatacaattgtttagtgattttacaatcgataatatagtcactagtttggcaattaaaaattattatagaaagactaactctaccgtagacgtgcgtaatattgttacgtttataaacgattacgctaatttagacgatgtctactcgtatgttcctccttgtcaatgcactgttcaagaatttatattttccgcattagatgaaaaatggaatgaatttaaatcatcttatttagaaagcgttccgttaccctgccaattaatgtacgcgttagaaccacgtaaggagattgatgtttcagaagttaaaactttatcatcttatatagatttcgaaaatactaaatcagatatcgatgttataaaatctatatcctcgatcttcggatattctaacgaaaactgtaacacgatagtattcggcatctataaggataatttactactgagtataaataattcattttactttaacgatagtctgttaataaccaatactaaaagtgataatataataaatataggttactagattaaaaatggtgttccaactcgtgtgctctacgtgcggcaaagatatttctcacgaacgatataaattgattatacgaaaaaaatcattaaaggatgtactcgtcagtgtaaagaacgaatgttgtaggttaaaattatctacacaaatagaacctcaacgtaacttaacagtgcaacctctattggatataaactaatatggatccggttaattttatcaagacatatgcgcctagaggttctattatttttattaattataccatgtcattaacaagtcatttgaatccatcgatagaaaaacatgtgggtatttattatggtacgttattatcggaacacttggtagttgaatctacctatagaaaaggagttcgaatagtcccattggatagtttttttgaaggatatcttagtgcaaaagtatacatgttagagaatattcaagttatgaaaatagcagctgatacgtcattaactttattgggtattccgtatggatttggtcataatagaatgtattgttttaaattggtagctgaatgttataaaaatgccggtattgatacatcgtctaaacgaatattaggtaaagatatttttctgagccaaaacttcacagacgataatagatggataaagatatatgattctaataatttaacattttggcaaattgattaccttaaagggtgagttaatatgcataactactcctccgttgttttttccctcgttctttttcttaacgttgtttgccatcactctcataatgtaaagatattctaaaatggtaaacttttgcatatcggacgcagaaattggtataaatgttgtaattgtattatttcccgtcaatggactagtcacagctccatcagttttatatcctttagagtatttctcactcgtgtctaacattctagagcattccatgatctgtttatcgttgatattggccggaaagatagattttttattttttattatattactattggcaattgtagatataacttctggtaaatatttttctaccttttcaatctcttctattttcaagccggctatatattctgctatattgttgctagtatcaataccttttctggctaagaagtcatatgtggtattcactatatcagttttaactggtagttccattagcctttccacttctgcagaataatcagaaattggttctttaccagaaaatccagctactataataggctcaccgatgatcattggcaaaatcctatattgtaccagattaatgagagcatatttcatttccaataattctgctagttcttgagacattgatttatttgatgaatctagttggttctctagatactctaccatttctgccgcatacaataacttgttagataaaatcagggttatcaaagtgtttagcgtggctagaatagtgggcttgcatgtattaaagaatgcggtagtatgagtaaaccgttttaacgaattatatagtctccagaaatctgtggcgttacatacatgagccgaatgacatcgaagattgtccaatatttttaatagctgctctttgtccattatttctatatttgactcgcaacaattgtagataccattaatcaccgattcctttttcgatgccggacaatagcacaattgtttagctttggactctatgtattcagaattaatagatatatctctcaatacagattgcactatacattttgaaactatgtcaaaaattgtagaacgacgctgttctgcagccatttaactttaaataatttacaaaaatttaaaatgagcatccgtataaaaatcgataaactgcgccaaattgtggcatatttttcagagttcagtgaagaagtgtctataaatgtagactcgacggatgagttaatgtatatttttgccgccttgggcggatctgtaaacatttgggcaattatacctctaagtgcatcagtgttttaccgaggagccgaaaatattgtgtttaatcttcctgtgtccaaggtaaaatcgtgtttgtgtagttttcacaatgatgccatcatagatatagaacctgatctggaaaataatctagtaaaactttctagttatcatgtagtaagtgtcgattgtaacaaggaactgatgcctattaggacagatactactatttgtctaagtatagatcaaaagaaatcttacgtgtttaattttcacaagtatgaagaaaaatgttgtggtagaaccgtcattcatctagaatggttgttgggctttatcaagtgtattagtcagcatcagcatctggctattatgtttaaagatgacaatattattatgaagactcctggtaatactgatgcgttttccagggaatattctatgactgaatgttctcaagaactacaaaagttttctttcaaaatagctatctcgtctctcaacaaactacgaggattcaaaaagagagtcaatgtttttgaaactagaatcgtaatggataatgacgataacattttaggaatgttgttttcggatagagttcaatcctttaagatcaacatctttatggcgtttttagattaatactttcaatgagataaatatgggtggcggagtaagtgttgagctccctaaacgggatccgcctccgggagtacccactgatgagatgttattaaacgtggataaaatgcatgacgtgatagctcccgctaagcttttagaatatgtgcatataggaccactagcaaaagataaagaggataaagtaaagaaaagatatccagagtttagattagtcaacacaggacccggtggtctttcggcattgttaagacaatcgtataatggaaccgcacccaattgctgtcgcacttttaatcgtactcattattggaagaaggatggaaagatatcagataagtatgaagagggtgcagtattagaatcgtgttggccagacgttcacgacactggaaaatgcgatgttgatttattcgactggtgtcagggggatacgttcgatagaaacatatgccatcagtggatcggttcagcctttaataggagtaatagaactgtagagggtcaacaatcgttaataaatctgtataataagatgcaaacattatgtagtaaagatgctagtgtaccaatatgcgaatcatttttgcattatttacgcgcacacaatacagaagatagcaaagagatgatcgattatattctaagacaacagtctgcggactttaaacagaaatatatgagatgtagttatcccactagagataagttagaagagtcattaaaatatgcggaacctcgagaatgttgggatccagagtgttcgaatgccaatgttaatttcttactaacacgtaattataataatttaggactttgcaatattgtacgatgtaataccagcgtgaacaacttacagatggataaaacttcctcattaagattgtcatgtggattaagcaatagtgatagattttctactgttcccgtcaatagagcaaaagtagttcaacataatattaaacactcgttcgacctaaaattgcatttgatcagtttattatctctcttggtaatatggatactaattgtagctatttaaatgggtgccgcggcaagcatacagacgacggtgaatacactcagcgaacgtatctcgtctaaattagaacaagaagcgaacgctagtgctcaaacaaaatgtgatatagaaatcggaaatttttatatccgacaaaaccatggatgtaacctcactgttaaaaatatgtgctctgcggacgcggatgctcagttggatgctgtgttatcagccgctacagaaacatatagtggattaacaccggaacaaaaagcatacgtgccagctatgtttactgctgcgttaaacattcagacgagtgtaaacactgttgttagagattttgaaaattatgtgaaacagacttgtaattctagcgcggtcgtcgataacaaattaaagatacaaaacgtaatcatagatgaatgttacggagccccaggatctccaacaaatttggaatttattaatacaggatctagcaaaggaaattgtgccattaaagcgttgatgcaattgacgactaaggccactactcaaatagcacctagacaagttgctggtacaggagttcagttttatatgattgttatcggtgttataatattggcagcgttgtttatgtactatgccaagcgtatgttgttcacatccaccaatgataaaatcaaacttattttagccaataaggaaaacgtccattggactacttacatggacacattctttagaacttctccgatggttattgctaccacggatatgcaaaactgaaaatatattgataatattttaatagattaacatggaagttatcgctgatcgtctagacgatatagtgaaacaaaatatagcggatgaaaaatttgtagattttgttatacacggtctagagcatcaatgtcctgctatacttcgaccattaattaggttgtttattgatatactattatttgttatagtaatttatatttttacggtacgtctagtaagtagaaattatcaaatgttgttggtggtgctagtcatcacattaactattttttattactttatactataatagtactagactgacttctaacaaacatctcacctgccataaataaatgcttgatattaaagtcttctatttctaacactattccatctgtggaaaataatactctgacattatcgctaattgacacatcggtgagtgatatgcctataaagtaataatcttctttgggcacatataccagtgtaccaggttctaacaacctatttactggtgctcctgtagcatactttttctttaccttgagaatatccatcgtttgcttggtcaatagcgatatgtgattttttatcaaccactcgaaaaagtaattggagtgttcatatcctctacgggctattgtctcatggccgtgtatgaaatttaagtaacacgactgtggtagatttgttctatagagccgattgccgcaaatagatagaactaccaatatgtctgtacaaatgttaaacattaattgattaacagaaaaaacaatgttcgttctgggaatagaaaccagatcaaaacaaaattcgttagaatatatgccacgtttatacatggaatataaaataactacagtttgaaaaataacagtatcatttaaacatttaacttgcggggttaatttcacaactttactgtttttgaactgttcaaaatatagcatcgatccgtgagaaatacgtttagccgcctttaatagaggaaatcccaccgcctttctggatctcaccaacgacgatagttctgaccagcaactcatttcttcatcatccacctgttttaacatataataggcaggagatagatatccgtcattgcaatattccttctcgtaggcacacaatctaatattgataaaatctccattctcttctctgcatttattatcttgtttcggtggctgattaggctgtagtcttggtttaggccttggtctatcgttgttgaatctattttggtcattaaatctttcatttcttcctggtatatttctatcacctcgtttggttggatttttgtctatattatcgtttgtaacatcggtacgggtattcatttatcacaaaaaaaacttctctaaatgagtctactgctagaaaacctcatcgaagaagataccatattttttgcaggaagtatatctgagtatgatgatttacaaatggttattgccggcgcaaaatccaaatttccaagatctatgctttctatttttaatatagtacctagaacgatgtcaaaatatgagttggagttgattcataacgaaaatatcacaggagcaatgtttaccacaatgtataatataagaaacaatttgggtctaggagatgataaactaactattgaagccattgaaaactatttcttggatcctaacaatgaagttatgcctcttattattaataatacggatatgactgccgtcattcctaaaaaaagtggtaggagaaagaataagaacatggttatcttccgtcaaggatcatcacctatcttgtgcattttcgaaactcgtaaaaagattaatatttataaagaaaatatggaatccgcgtcgactgagtatacacctatcggagacaacaaggctttgatatctaaatatgcgggaattaatgtcctgaatgtgtattctccttccacatccataagattgaatgccatttacggattcaccaataaaaataaactagagaaacttagtactaataaggaactagaatcgtatagttctagccctcttcaagaacccattaggttaaatgattttctgggactattggaatgtgttaaaaagaatattcctctaacagatattccgacaaaggattgattactataaatggagaatgttcctaatgtatactttaatcctgtgtttatagagcccacgtttaaacattctttattaagtgtttataaacacagattaatagttttatttgaagtattcgttgtattcattctaatatatgtattttttagatctgaattaaatatgttctttatgcctaaacgaaaaatacccgatcctattgatagattacgacgtgctaatctagcgtgtgaagacgataaattaatgatctatggattaccatggatgacaactcaaacatctgcgttatcaataaatagtaaaccgatagtgtataaagattgtgcaaagcttttgcgatcaataaatggatcacaaccagtatctcttaacgatgttcttcgcagatgatgattcattttttaagtatttggctagtcaagatgatgaatcttcattatctgatatattgcaaatcactcaatatctagactttctgttattattattgatccaatcaaaaaataaattagaagctgtgggtcattgttatgaatctctttcagaggaatacagacaattgacaaaattcacagactttcaagattttaaaaaactgtttaacaaggtccctattgttacagatggaagggtcaaacttaataaaggatatttgttcgactttgtgattagtttgatgcgattcaaaaaagaatcctctctagctaccaccgcaatagatcctgttagatacatagatcctcgtcgtgatatcgcattttctaacgtgatggatatattaaagtcgaataaagtgaacaataattaattctttattgtcatcatgaacggcggacatattcagttgataatcggccccatgttttcaggtaaaagtacagaattaattagacgagttagacgttatcaaatagctcaatataaatgcgtgactataaaatattctaacgataatagatacggaacgggactatggacgcatgataagaataattttgaagcattggaagcaactaaactatgtgatgtcttggaatcaattacagatttctccgtgataggtatcgatgaaggacagttctttccagacattgtttaattctgtgagcgtatggcaaacgaaggaaaaatagttatagtagccgcactcgatgggacatttcaacgtaaaccgtttaataatattttgaatcttattccattatctgaaatggtggtaaaactaactgctgtgtgtatgaaatgctttaaggaggcttccttttctaaacgattgggtgaggaaaccgagatagagataataggaggtaatgatatgtatcaatcggtgtgtagaaagtgttacatcgactcataatattatattttttatctaaaaaactaaaaataaacattgattaaattttaatataatacttaaaaatggatgttgtgtcgttagataaaccgtttatgtattttgaggaaattgataatgagttagattacgaaccagaaagtgcaaatgaggtcgcaaaaaaactgccgtatcaaggacagttaaaactattactaggagaattattttttcttagtaagttacagcgacacggtatattagatggtgccaccgtagtgtatataggatctgctcccggtacacatatacgttatttgagagatcatttctataatttaggagtgatcatcaaatggatgctaattgacggccgccatcatgatcctattttaaatggattgcgtgatgtaactctagtgactcggttcgttgatgaggaatatctacgatccatcaaaaaacaactgcatccttctaagattattttaatttctgatgtaagatccaaacgaggaggaaatgaacctagtacggcggatttactaagtaattacgctctacaaaatgtcatgattagtattttaaaccccgtggcatctagtcttaaatggagatgcccgtttccagatcaatggatcaaggacttttatatcccacacggtaataaaatgttacaaccttttgctccttcatattcagctgaaatgagattattaagtatttataccggtgagaacatgagactgactcgagttaccaaattagacgctgtaaattatgaaaaaaagatgtactaccttaataagatcgtccgtaacaaagtagttgttaactttgattatcctaatcaggaatatgactattttcacatgtactttatgctgaggaccgtgtactgcaataaaacatttcctactactaaagcaaaggtactatttctacaacaatctatatttcgtttcttaaatattccaacaacatcaactgaaaaagttagtcatgaaccaatacaacgtaaaatatctagcaaaaattctatgtctaaaaacagaaatagcaagagatccgtacgcggtaataaatagaaacgtactactgagatatactaccgatatagagtataatgatttagttactttaataaccgttagacataaaattgattctatgaaaactgtgtttcaggtatttaacgaatcatccataaattatactccggttgatgatgattatggagaaccaatcattataacatcgtatcttcaaaaaggtcataacaagtttcctgtaaattttctatacatagatgtggtaatatctgacttatttcctagctttgttagactagatactacagaaactaatatagttaatagtgtactacaaacaggcgatggtaaaaagactcttcgtcttcccaaaatgttagagacggaaatagttgtcaagattctctatcgccctaatataccattaaaaattgttagatttttccgcaataacatggtaactggagtagagatagccgatagatctgttatttcagtcgctgattaatcaattagtagagatgagataagaacattataataattaataatattatcttatatcttatcttatatcttatatcttgtttagaaaaatgctaatattaaaatagctaacgctagtaatccaatcggaagccatttgatatctataatagggtatctaatttcctgatttaaatagcggacagctatattctcggtagctactcgtttggaatcacaaacattatttacatctaatttactatctgtaatggaaacgtttcccaatgaaatggtacaatccgatacattgcattttgttatatttttttttaaagaggctggtaacaacgcatcgcttcgtttacatggctcgtaccaacaataatagggtaatcttgtatctattcctatccgtactatgcttttatcaggataaatacatttacatcgtatatcgtctttgttagcatcacagaatgcataaatttgttcgtccgtcatgataaaaatttaaagtgtaaatataactattatttttatagttgtaataaaaagggaaatttgattgtatactttcggttctttaaaagaaactgacttgataaaaatggctgtaatctctaaggttacgtatagtctatatgatcaaaaagagattaatgctacagatattatcattagtcatgttaaaaatgacgacgatatcggtaccgttaaagatggtagactaggtgctatggatggggcattatgtaaaacttgtgggaaaacggaattggaatgtttcggtcactggggtaaagtaagtatttataaaactcatatagttaagcctgaatttatttcagaaattattcgtttactgaatcatatatgtattcactgcggattattgcgttcacgagaaccgtattccgacgatattaacctaaaagagttatcgggacacgctcttaggagattaaaggataaaatattatccaagaaaaagtcatgttggaacagcgaatgtatgcaaccgtatcaaaaaattactttttcaaagaaaaaggtttgtttcgtcaacaagttggatgatattaacgttcctaattctctcatctatcaaaagttaatttctattcatgaaaagttttggccattattagaaattcatcaatatccagctaacttattttatacagactactttcccatccctccgctgattattagaccggctattagtttttggatagatagtatacccaaagaaaccaatgaattaacttacttattaggtatgatcgttaagaattgtaacttgaatgctgatgaacaggttatccagaaggcggtaatagaatacgatgatattaaaattatttctaataacactaccagtatcaatttatcatatattacatccggcaaaaataatatgattagaagttatatcgtcgcccgacgaaaagatcagaccgctagatctgtaattggtcccagtacatctatcaccgttaatgaggtaggaatgcccgcatatattagaaatacacttacagaaaagatatttgttaatgcctttacagtggataaagttaaacaactattagcgtcaaaccaagttaaattttactttaataaacgattaaaccaattaacaagaatacgccaaggaaagtttattaaaaataaaatacatttattgcctggtgattgggtagaagtagctgttcaagaatatacaagtattatttttggaagacagccgtctctacatagatacaacgtcatcgcttcatctatcagagctaccgaaggagatactatcaaaatatctcccggaattgccaactctcaaaatgctgatttcgacggggatgaggaatggatgatattagaacaaaatcctaaagctgtaattgaacaaagtattcttatgtatccgacgacgttactcaaacacgatattcatggagcccccgtttatggatctattcaagatgaaatcgtagcagcgtattcattgtttaggatacaagatctttgtttagatgaagtattgaacatcttggggaaatatggaagagagttcgatcctaaaggtaaatgtaaattcagcggtaaagatatctatacttacttgataggtgaaaagattaattatccgggtctcttaaaggatggtgaaattattgcaaacgacgtagatagtaattttgttgtggctatgaggcatctgtcattggctggactcttatccgatcataagtcgaacgtggaaggtatcaactttattatcaagtcatcttatgtttttaagagatatctatctatttacggttttggggtgacattcaaagatctgagaccaaattcgacgttcactaataaattggaggccatcaacgtagaaaaaatagaacttatcaaagaagcatacgccaaatatctcaacgatgtaagagacgggaaaatagttccattatctaaagctttagaggcggactatgtggaatccatgttatccaacttgacaaatcttaatatccgagagatagaagaacatatgagacaaacgctgatagataatccagataataacctcctgaaaatggccaaagcgggttataaagtaaatcccacagaactaatgtatattctaggtacgtatggacaacaaaggattgatggtgaaccagcagagactcgagtattgggtagagttttaccttactatcttccagactctaaggatccagaaggaagaggttatattcttaattctttaacaaaaggattaacgggttctcaatattacttttcgatgctggttgcaagatctcaatctactgatatcgtctgtgaaacatcacgtaccggaacactggctagaaaaatcattaaaaagatggaggatatggtggtcgacggatacggacaagtagttataggtaatacgctcatcaagtacgccgccaattataccaaaattctaggctcagtatgtaaacctgtagatcttatctatccagatgagtccatgacttggtatttggaaattagtgctctgtggaataaaataaaacagggattcgtttactctcagaaacagaaacttgcaaagaagacattggcgccgtttaatttcctagtattcgtcaaacccaccactgaggataatgctattaaggttaaggatctgtacgatatgattcataacgtcattgatgatgtgagagagaaatacttctttacggtatctaatatagattttatggagtatatattcttgacgcatcttaatccttctagaattagaattacaaaagaaacggctatcactatctttgaaaagttctatgaaaaactcaattatactctaggtggtggaactcctattggaattatttctgcacaggtattgtctgagaagtttacacaacaagccctgtccagttttcacactactgaaaaaagtggtgccgtcaaacaaaaacttggtttcaacgagtttaataacttgactaatttgagtaagaataagaccgaaattatcactctggtatccgatgatatctctaaacttcaatctgttaagattaatttcgaatttgtatgtttgggagaattaaatccagacatcactcttcgaaaagaaacagataggtatgtagtagatataatagtcaatagattatacatcaagagagcagaaataaccgaattagtcgtcgaatatatgattgaacgatttatctcctttagcgtcattgtaaaggaatggggtatggagacattcattgaggacgaggataatattagatttactgtctatctaaatttcgttgaaccggaagaattgaatcttagtaagtttataatggttcttccgggggcagccaacaagggcaagattagtaaattcaagattcctatctctgactatacgggttatgacgacttcaatcaaacaaaaaagctcaataagatgactgtagaactcatgaatctaaaagaattgggttctttcgatttggaaaacgtcaacgtgtatcctggagtatggaatacatacgatatcttcggtatcgaggccgctcgtgaatacttgtgcgaagccatgttaaacacctatggagaagggttcgattatctgtatcagccttgtgatcttctcgctagtttactatgtgctagttacgaaccagaatcagtgaataaattcaagttcggcgcagctagtactcttaagagagctacgttcggagacaataaagcattgttaaacgcggctcttcataaaaagtcagaacctattaacgataatagtagctgccacttttttagcaaggtccctaatataggaactggatattacaaatactttatcgacttgggtcttctcatgagaatggaaaggaaactatctgataagatatcttctcaaaagatcaaggaaatggaagaaacagaagacttttaattcttatcaataacatatttttctatgatctgtcttttaaacgatggattttccacaaatgcgcctctcaagtccctcatagaatgatacacgtataaaaaatatagcataggcaatgactccttatttttagacattagatatgccaaaatcatagccccgcttctatttactcccgcagcacaatgaaccaacacgggctcgtttcgttgatcacatttagataaaaaggcggttacgtcgtcaaaatatttactaatatcggtagttgtatcatctaccaacggtatatgaataatattaatattagagttaggtaatgtatatttatccatcgtcaaatttaaaacatatttgaacttaacttcagatgatggtgcatccatagcatttttataatttcccaaatacacattattggttacccttgtcattatagtgggagatttggctctgtgcatatctccagttgaacgtagtagtaagtatttatacaaacttttcttatccatttataacgtacaaatggataaaactactttatcggtaaacgcgtgtaatttagaatacgttagagaaaaggctatagtaggcgtacaagcagccaaaacatcaacacttatattctttgttattatattggcaattagtgcgctattactctggtttcagacgtctgataatccagtctttaatgaattaacgagatatatgcgaattaaaaatacggttaacgattggaaatcattaacggatagcaaaacaaaattagaaagtgatagaggtagacttctagccgctggtaaggatgatatattcgacttcaaatgtgtggatttcggcgcctattttatagctatgcgattggataagaaaacatatctgccgcaagctattaggcgaggtactggagacgcgtggatggttaaaaaggcggcaaaggtcgatccatctgctcaacaattttgtcagtatttgataaaacacaagtctaataatgttattacttgtggtaatgagatgttaaatgaattaggttatagcggttattttatgtcaccgcattggtgttccgattttagtaatatggaatagtgttagataaatgcggtaacgaatgttcctgtaaggaaccataacagcttagatttaacgttaaagatgagcataaacataataaacaaaattacaatcaaacttataacattaatatcaaacaatccaaaaaatgaaatcagtggagtagtaaacgcgtacataactcctggataacgtttagcagctgccgttcctattctagaccaaaaatttggtttcatgttttcgaaacggtattctgcaacaagtcggggatcgtgttctacatatttggcggcattatccagtatctgcctattgatcttcatttcgttttcgattctggctatttcaaaataaaatcccgatgatagacctccagactttataatttcatctacgatgttcagcgccgtagtaactctaataatataggctgataagctaacatcataccctcctgtatatgtgaatatggcatgatttttgtccattacaagctcggttttaactttattgcctgtaataatttctctcatctgtaggatatctatttttttgtcatgcattgccttcaagacgggacgaagaaacgtaatatcctcaataacgttatcgttttctacaataactacatattctacctttttattttctaactcggtaaaaaaattagaatcccatagggctaaatgtctagcgatatttcttttcgtttcttctgtacacatagtgttacaaaaccctgaaaagaagtgagtatacttgtcatcatttctaatgtttcctccagtccactgtataaacgcataatccttgtaatgatctggatcatccttgactaccacaacatttcttttttctggcataacttcgttgtcctttacatcatcgaacttctgatcattaatatgctcatgaacattaggaaatgtttctgatggaggtctatcaataactggcacaacaataacaggagttttcaccgccgccatttagttattgaaattaatcatatacaactctttaatacgagttatattttcgtctatccattgtttcacattgacatatttcgacaaaaagatataaaatgcgtattccaatgcttctctgtttaatgaattactaaaatatacaaacacgtcactgtctggcaataaatgatatcttagaatattgtaacaatttattttgtattgcacatgttcgtgatctatgagttcttcttcgaatggcataggatctccgaatctgaaaacgtataaataggagttagaataataatatttgagagtattggtaatatataaactctttagcggtataattagtttttttctctcaatttctatttttagatgtgatggaaaaatgactaattttgtagcattagtatcatgaactctaatcaaaatcttaatatcttcgtcacacgttagctctttgaagtttttaagagatgcatcagttggttctacagatggagtaggtgcaacaattttttgttctacacatgtatgtactggagccattgttttaactataatggtgcttgtatcgaaaaactttaatgcagatagcggaagctcttcgccgcgactttctacatcgtaattgggttctaacgccgatctctgaatggatactagttttctaagttctaatgtgattctctgaaaatgtaaatccaattcctccggcattatagatgtgtatacatcggtaaataaaactatagtatccaacgatcccttctcgcaaattctagtcttaaccaaaaaatcgtatataaccacggagatggcgtatttaagagtggattcttctaccgttttgttcttggatgtcatataagaaactataaagtccgcactactgttaagaatgattactaacgcaactatatagttcaaattaagcattttggaaacataaaataactctgtagacgatacttgactttcgaataagtttgcagacaaacgaagaaagaacagacctctcttaatttcagaagaaaactttttttcgtattcctgacgtctagagtttatatcaataagaaagttaagaattagtcggttaatgttgtatttcattacccaagtttgagatttcataatattatcaaaagacatgataatattaaagataaagcgctgactatgaacgaaatagctatatggttcgctcaaaaatatagtcttgttaaacgtggaaacgataactgtatttttaatcacgtcagcggcatctaaattaaatataggtatatttattccacacactctacaatatgccacaccatcttcataataaataaattcgttagcaaaattattaattttagtgaaatagttagcgtcaactttcatagcttccttcaatctaatttgatgctcacacggtgcgaattccactctaacatcccttttccatgcctcaggttcatcgatctctataatatctagttttttgcgtttcacaaacacaggctcgtctctcgcgatgagatctgtatagtaactatgtaaatgataactagatagaaagatgtagctatatagatgacgatcctttaagagaggtataataactttaccccaatcagatagactgttgttatggtcttcggaaaaagaatttttataaatttttccagtattttccaaatatacgtacttaacatctaaaaaatccttaatgataataggaatggataatccgtctattttataaagaaatacatatcgcacattatacttttttttggaaatgggaataccgatgtgtctacataaatatgcaaagtctaaatattttttagagaatcttagttggtccaaattcttttccaagtacggtaatagatttttcatattgaacggtatcttcttaatctctggttctagttccgcattaaatgatgaaactaagtcactatttttataactaacgattacatcacctctaacatcatcatttaccagaatactgatcttcttttgtcgtaaatacatgtctaatgtgttaaaaaaaagatcatacaagttatacgtcatttcatctgtggtattcttgtcattgaaggataaactcgtactaatctcttctttaacagcctgttcaaatttatatcctatatacgaaaaaatagcaaccagtgtttgatcatccgcgtcaatattctgttctatcgtagtgtataacaatcgtatatcttcttctgtgatagtcgatacgttataaaggttgataacgaaaatatttttatttcgtgaaataaagtcatcgtaggattttggacttatattcgcgtctagtaaatatgcttttatttttggaatgatctcaattagaatagtctctttagagtccatttaaagttacaaacaactaggaaattggtttatgatgtataatttttttagtttttatagattctttattctatacttaaaaaatgaaaataaatacaaaggttcttgagggttgtgttaaattgaaagcgagaaataatcataaattatttcattatcgcgatatccgttaagtttgtatcgtaatggcgtggtcaattacaaataaagcggatactagtagcttcacaaagatggctgaaatcagagctcatctaaaaaatagcgctgaaaataaagataaaaacgaggatattttcccggaagatgtaataattccatctactaagcccaaaaccaaacgagccactactcctcgtaaaccagcggctactaaaagatcaaccaaaaaggaggaagtggaagaagaagtagttatagaggaatatcatcaaacaactgaaaaaaattctccatctcctggagtcagcgacattgtagaaagcgtggctgctgtagagctcgatgatagcgacggggatgatgaacctatggtacaagttgaagctggtaaagtaaatcatagtgctagaagcgatctttctgacctaaaggtggctaccgacaatatcgttaaagatcttaagaaaattattactagaatctctgcagtatcgactgttctagaggatgttcaagcagctggtatctctagacaatttacttctatgactaaagctattacaacactatctgatctagtcaccgagggaaaatctaaagttgttcgtaaaaaagttaaaacttgtaagaagtaaatgcgtgcacttttttataaagatggtaaactctttaccgataataattttttaaatcctgtatcagacgataatccagcgtatgaggttttgcaacatgttaaaattcctactcatttaacagatgtagtagtatatgaacaaacgtgggaggaggcgttaactagattaatttttgtgggaagcgattcaaaaggacgtagacaatacttttacggaaaaatgcatgtacagaatcgcaacgctaaaagagatcgtatttttgttagagtatataacgttatgaaacgaattaattgttttataaacaaaaatataaagaaatcgtccacagattccaattatcagttggcggtttttatgttaatggaaactatgttttttattagatttggtaaaatgaaatatcttaaggagaatgaaacagtagggttattaacactaaaaaataaacacatagaaataagtcccgatgaaatagttatcaagtttgtaggaaaggacaaagtttcacatgaatttgttgttcataagtctaatagactatataaaccgctattgaaactgacggatgattctagtcccgaagaatttctgttcaacaaactaagtgaacgaaaggtatacgaatgtatcaaacagtttggtattagaatcaaggatctccgaacgtatggagtcaattatacgtttttatataatttttggacaaatgtaaagtccatatctcctcttccatcaccaaaaaagttaatagcgttaactatcaaacaaactgctgaagtggtaggtcatactccatcaatttcaaaaagagcttacatggcaacgactattttagaaatggtaaaggataaaaattttttagatgtagtatctaaaactacgttcgatgaattcctatctatagtcgtagatcacgttaaatcatctacggatggatgatatagatctttacacaaataattacaagaccgataaatggaaatggataagcgtatgaaatctctcgcaatgacagctttcttcggagagctaaacacattagatattatggcattgataatgtctatatttaaacgccatccaaacaataccattttttcagtggataaggatggtcagtttatgattgatttcgaatacgataattataaggcttctcaatatttggatctgaccctcactccgatatttggagatgaatgcaagactcacgcatcgagtatagccgaacaattggcgtgtgcggatattattaaagaggatattagcgaatatatcaaaactactccccgtcttaaacgatttataaaaaaataccgcaatagatcagatactcgtatcagtcgagatacagaaaagcttaaaatagctctagctaaaggcatagattacgaatatataaaagacgcttgttaataagtaaatgaaaaaaaactagtcgtttataataaaacacgatatggatgccaacgtagtatcatcttctactattgcaacgtatatagacgctttagcgaagaatgcttcagaattagaacagaggtctaccgcatacgaaataaataatgaattggaactagtatttattaagccgccattgattactttgacaaatgtagtgaatatctctacgattcaggaatcgtttattcgatttaccgttactaataaggaaggtgttaaaattagaactaagattccattatctaaggtacatggtctagatgtaaaaaatgtacagttagtagatgctatagataacatagtttgggaaaagaaatcattagtgacggaaaatcgtcttcacaaagaatgcttgttgagactatcgacagaggaacgtcatatatttttggattacaagaaatatggatcctctatccgactagaattagtcaatcttattcaagcaaaaacaaaaaactttacgatagactttaagctaaaatattttctaggatccggtgcccaatctaaaagttctttgttgcacgctattaatcatccaaagtcaaggcctaatacatctctggaaatagaattcacacctagagacaatgaaacagttccatatgatgaactaataaaggaattgacgactctatcacgtcatatatttatggcttctccagagaatgtaattctttctccgcctattaacgcgcctataaaaacctttatgttgcctaaacaagatatagtaggtctggatctggaaaatctatatgccgtaactaagactgacggcattcctataactatcagagttacatcaaacgggttgtattgttattttacacatcttggttatattattagatatcctgttaagagaataatagattccgaagtagtagtctttggtgaggcagttaaggataagaactggaccgtatatctcattaagctaatagagcccgtgaatgcaatcaatgatagactagaagaaagtaagtatgttgaatctaaactagtggatatttgtgatcggatagtattcaagtcaaagaaatacgaaggtccgtttactacaactagtgaagtcgtcgatatgttatctacatatttaccaaagcaaccagaaggtgttattctgttctattcaaagggacctaaatctaacattgattttaaaattaaaaaggaaaatactatagaccaaactgcaaatgtagtatttaggtacatgtccagtgaaccaattatctttggagaatcgtctatctttgtagagtataagaaatttagcaacgataaaggctttcctaaagaatatggttctggtaagattgtgttatataacggcgttaattatctaaataatatctattgtttggaatatattaatacacataatgaagtgggtattaagtccgtggttgtacctattaagtttatagcagaattcttagttaatggagaaatacttaaacctagaattgataaaaccatgaaatatattaactcagaagattattatggaaatcaacataatatcatagtcgaacatttaagagatcaaagcatcaaaataggagatatctttaacgaggataaactatcggatgtgggacatcaatacgccaataatgataaatttagattaaatccagaagttagttattttacgaataaacgaactagaggaccgttgggaattttatcaaactacgtcaagactcttcttatttctatgtattgttccaaaacatttttagacgattccaacaaacgaaaggtattggcgattgattttggaaacggtgctgacctggaaaaatacttttatggagagattgcgttattggtagcgacggatccggatgctgatgctatagctagaggaaatgaaagatacaacaaattaaactctggaattaaaaccaagtactacaaatttgactacattcaggaaactattcgatccgatacatttgtctctagtgtcagagaagtattctattttggaaagtttaatatcatcgactggcagtttgctatccattattcttttcatccgagacattatgctaccgtcatgaataacttatccgaactaactgcttctggaggcaaggtattaatcactaccatggacggagacaaattatcaaaattaacagataaaaagacttttataattcataagaatttacctagtagcgaaaactatatgtctgtagaaaaaatagctgatgatagaatagtggtatataatccatcaacaatgtctactccaatgactgaatacattatcaaaaagaacgatatagtcagagtgtttaacgaatacggatttgttcttgtagataacgttgatttcgctacaattatagaacgaagtaaaaagtttattaatggcgcatctacaatggaagatagaccgtctacaaaaaactttttcgaactaaatagaggagccattaaatgtgaaggtttagatgtcgaagacttacttagttactatgttgtttatgtcttttctaagcggtaaataataatatggtatgggttctgatatccccgttctaaatgcattaaataattccaatagagcgatttttgttcctataggaccttccaactgtggatactctgtattgttaatagatatattaatacttttgtcgggtaacagaggttctacgtcttctaaaaataaaagttttataacatctggcctgttcataaataaaaacttggcgattctatatatactcttattatcaaatctagccattgtcttatagatgtgagctactgtaggtgtaccatttgattttctttctaatactatatatttctctcgaagaagttcttgcacatcatctgggaataaaatactactgttgagtaaatcagttattttttttatatcgatattgatggacatttttatagttaaggataataagtatcccaaagtcgataacgacgataacgaagtatttatacttttaggaaatcacaatgactttatcagattaaaattaacaaaattaaaggagcatgtatttttttctgaatatattgtgactccagatacatatggatctttatgcgtcgaattaaatgggtctagttttcagcacggtggtagatatatagaggtggaggaatttatagatgctggaagacaagttagatggtgttctacatccaatcatatatctaaagatatacccgaagatatgcacactgataaatttgtcatttatgatatatacacttttgacgctttcaagaataaacgattggtattcgtacaggtacctccgtcgttaggagatgatagtcatttgactaatccgttattgtctccgtattatcgtaattcagtagccagacaaatggtcaataatatgatttttaatcaagattcatttttaaaatatttattagaacatctgattagaagccactatagagtttctaaacatataacaatagttagatacaaggataccgaagaattaaatctaacgagaatatgttataatagagataagtttaaggcgtttgtattcgcttggtttaacggcgtttcggaaaatgaaaaggtactagatacgtataaaaaggtatctaatttgatataatgaattcagtgactgtatcacacgcgccatatactattacttatcacgatgattgggaaccagtaatgagtcaattggtagagttttataacgaagtagccagttggctgctacgagacgagacgtcgcctattcctgataagttctttatacagttgaaacaaccgcttagaaataaacgagtatgtgtgtgcggtatagatccgtatccgaaagatggaactggtgtaccgttcgaatcaccaaattttacaaaaaaatcaattaaggagatagcttcatctatatctagattaaccggagtaattgattataaaggttataaccttaatataatagacggggttataccctggaattattacttaagttgtaaattaggagaaacaaaaagtcacgcgatctactgggataagatttccaagttactgctgcagcatataactaaacacgttagtgttctttattgtttgggtaaaacagatttctcgaatatacgggcaaagttagaatccccggtaactaccatagtcggatatcatccagcggctagagaccgccaattcgagaaagatagatcatttgaaattatcaacgttttactggaattagacaacaaggcacctataaattgggctcaagggtttatttattaatgctttagtgaaattttaacttgtgttctaaatggatgcggctattagaggtaatgatgttatctttgttcttaagactataggtgtcccgtcagcgtgcagacaaaatgaagatccaagatttgtagaagcatttaaatgcgacgagttagaaagatatattgagaataatccagaatgtacactattcgaaagtcttagggatgaggaagcatactctatagtcagaattttcatggatgtagatttagacgcgtgtctagacgaaatagattatttaacggctattcaagattttattatcgaggtgtcaaactgtgtagctagattcgcgtttacagaatgcggtgccattcatgaaaatgtaataaaatccatgagatctaatttttcattgactaagtctacaaatagagataaaacaagttttcatattatctttttagacacgtataccactatggatacattgatagctatgaaacgaacactattagaattaagtagatcatctgaaaatccactaacaagatcgatagacactgccgtatataggagaaaaacaactcttcgggttgtaggtactaggaaaaatccaaattgcgacactattcatgtaatgcaaccaccgcatgataatatagaagattacctattcacttacgtggatatgaacaacaatagttattacttttctctacaacaacgattggaggatttagttcctgataagttatgggaaccagggtttatttcattcgaagacgctataaaaagagtttcaaaaatattcattaattctataataaactttaatgatctcgatgaaaataattttacaacggtaccactggtcatagattacgtaacaccttgtgcattatgtaaaaaacgatcgcataaacatccgcatcaactatcgttggaaaatggtgctattagaatttacaaaactggtaatccacatagttgtaaagttaaaattgttccgttggatggtaataaactgtttaatattgcacaaagaattttagacactaactctgttttattaaccgaacgaggagaccatatagtttggattaataattcatggaaatttaacagcgaagaacccttgataacaaaactaattttgtcaataagacatcaactacctaaggaatattcaagcgaattactctgtccgaggaaacgaaagactgtagaagctaacatacgagacatgttagtagattcagtggagaccgatacctatccggataaacttccgtttaaaaatggtgtattggacctggtagacggaatgttttactctggagatgatgctaaaaaatatacgtgtactgtatcaaccggatttaaatttgacgatacaaagttcgtcgaagacagtccagaaatggaagagttaatgaatatcattaacgatatccaaccattaacggatgaaaataagaaaaatagagagctatatgaaaaaacattatctagttgtttatgcggtgctaccaaaggatgtttaacattcttttttggagaaactgcaactggaaagtcgacaaccaaacgtttgttaaagtctgctatcggtgacctgtttgttgagacgggtcaaacaattttaacagatgtattggataaaggacctaatccatttatcgctaacatgcatttgaaaagatctgtattctgtagcgaactacctgattttgcatgtagtgggtcaaagaaaatcagatctgataatattaaaaagttgacagaaccttgtgtcattggaagaccgtgtttctccaataaaattaataatagaaaccatgcgacaatcattatcgatactaattacaaacctgtttttgataggatagataacgcattaatgagaagaattgccgtcgtgcgattcagaacacacttttctcaaccttctggtagagaggctgctgaaaataatgacgcgtacgataaagtcaaactattagacgaggggttagatggtaaaatacaaaataatagatatagattcgcatttctatacttgttggtgaaatggtacaaaaaatatcatgttcctattatgaaactatatcctacaccggaagagattcctgactttgcattctatctcaaaataggtactctgttagtatctagctctgtaaagcatattccattaatgacggacctctccaaaaagggatatatattgtacgataatgtggttactcttccgttgactactttccaacagaaaatatccaagtattttaattctagactatttggacacgatatagagagcttcatcaatagacataagaaatttgccaatgttagtgatgaatatctgcaatatatattcatagaggatatttcatctccgtaaatatatgctcatatatttatagaagatatcacatatctaaatgaataccggaatcatagatttatttgataatcatgttgatagtataccaactatattacctcatcagttagctactctagattatctagttagaactatcatagatgagaacagaagcgtgttattgttccatattatgggatcaggtaaaacaataatcgctttgttgttcgccttggtagcttccagatttaaaaaggtttacattctagtgccgaacatcaacatcttaaaaattttcaattataatatgggtgtagctatgaacttgtttaatgacgaattcatagctgagaatatctttattcattccacaacaagtttttattctcttaattataacgataacgtcattaattataacggattatctcgctacaataactctatttttatcgttgatgaggcacataatatctttgggaataatactggagaacttatgaccgtgataaaaaataaaaacaagattccttttctactattgtctggatctcccattactaacacacctaatactctgggtcatattatagatttaatgtccgaagagacgatagattttggtgaaattattagtcgtggtaagaaagtaattcagacacttcttaacgaacgaggtgtgaatgtacttaaggatttgcttaaaggaagaatatcatattacgaaatgcctgataaagatctaccaacgataagatatcacggacgtaagtttctagatactagagtagtatattgtcacatgtctaaacttcaagagagagattatatgattactagacgacagctatgttatcatgaaatgtttgataaaaatatgtataacgtgtcaatggcagtattgggacaacttaatctgatgaataatttagatactttatttcaggaacaggataaggaattgtacccaaatctgaaaataaataatggcgtgttatacggagaagaattggtaacgttaaacattagttccaaatttaaatactttattaatcggatacagacactcaacggaaaacattttatatacttttctaattctacatatggcggattggtaattaaatatatcatgctcagtaatggatattctgaatataatggttctcagggaactaatccacatatgataaacggcaaaccaaaaacatttgctatcgttactagtaaaatgaaatcgtctttagaggatctattagatgtgtataattctcctgaaaacgatgatggtagtcaattgatgtttttgttttcatcaaacattatgtccgaatcctatactctaaaagaggtaaggcatatttggtttatgactatcccagatactttttctcaatacaaccaaattcttggacgatctattagaaaattctcttacgccgatatttctgaaccagttaatgtatatcttttagccgccgtatattccgatttcaatgacgaagtgacgtcattaaacgattacacacaggatgaattaattaatgttttaccatttgacatcaaaaagctgttgtatctaaaatttaagacgaaagaaacgaatagaatatactctattcttcaagagatgtctgaaacgtattctcttccaccacatccatcaattgtaaaagttttattgggagaattggtcagacaatttttttataataattctcgtattaagtataacgataccaagttacttaaaatggttacatcagttataaaaaataaagaagacgctaggaattacatagatgatattgtaaacggtcacttctttgtatcgaataaagtatttgataaatctcttttatacaaatacgaaaacgatattattacagtaccgtttagactttcctacgaaccatttgtttggggagttaactttcgtaaagaatataacgtggtatcttctccataaaactgatgagatatataaagaaataaatgtcgagctttgttaccaatggatacctttccgttacattggaaccacacgagctgacgttagacataaaaactaatattaggaatgccgtatataagacgtatctccatagagaaattagtggtaaaatggccaagaaaatagaaattcgtgaagacgtggaattacctctcggcgaaatagttaataattctgtagttataaacgttccgtgtgtaataacctacgcgtattatcacgttggggatatagtcagaggaacattaaacatcgaagatgaatcaaatgtaactattcaatgtggagatttaatctgtaaactaagtagagattcgggtactgtatcatttagcgattcaaagtactgcttttttcgaaatggtaatgcgtatgacaatggcagcgaagtcactgccgttctaatggaggctcaacaaggtatcgaatctagttttgtttttctcgcgaatatcgtcgactcataaaaaagagaatagcggtaagtataaacacgaatactatggcaataattgcgaatgttttattctcttcgatatatttttgataatatgaaaaacatgtctctctcaaatcggacaaccatctcataaaatagttctcgcgcgctggagaggtagttgccgctcgtataatctctccagaataatatacttgcgtgtcgtcgttcaatttatacggatttctatagttctctgttatataatgcggtttgccctcatgattagacgacgacaatagtgttctaaatttagatagttgatcagaatgaatgtttattggcgttggaaaaattatccatgcagcgtctgcagagtggttgatagttgttcctagatatgtaaaataatccaacttactaggcagcaaattgtctagataaaatactgaatcaaacggtgcagacgtattggcggatctaatggaatccaattgattaactatcttttgaaaatatacatttttatgatccaatacttgtaagaatatagaaataatgataagtccatcatcgtgtttttttgcctcttcataagaactatattttttcttattccaatgaacaagattaatctctccagagtatttgtacacatctatcaagtgattggatccataatcgtcttcctttccccaatatatatgtagtgatgataacacatattcattggggagaaaccctccacttatatatcctcctttaaaattaatccttactagttttccagtgttctggatagtggttggtttcgactcattataatgtatgtctaacggcttcaatcgcgcgttagaaattgcttttttagtttctatattaataggagatagttgttgcggcatagtaaaaatgaaatgataactgtttaaaaatagctcttagtatgggaattacaatggatgaggaagtgatatttgaaactcctagagaattaatatctattaaacgaataaaagatattccaagatcaaaagacacgcatgtgtttgctgcgtgtataacaagtgacggatatccgttaataggagctagaagaacttcattcgcgttccaggcgatattatctcaacaaaattcagattctatctttagagtatccactaaactattacggtttatgtactacaatgaactaagagaaatctttagacggttgagaaaaggttctatcaacaatatcgatcctcactttgaagagttaatattattgggtggtaaactagataaaaaggaatctattaaagattgtttaagaagagaattaaaagaggaaagtgatgaacgtataacagtaaaagaatttggaaatgtaattctaaaacttacaacacgggataaattatttaataaagtatatataagttattgcatggcgtgttttattaatcaatcgttggaggatttatcgcatactagtatttacaatgtagaaattagaaagattaaatcattaaatgattgtattaacgacgataaatacgaatatctgtcttatatttataatatgctagttaatagtaaatgaacttttacagatctagtataattagtcagattattaagtataatagacgactagctaagtctattatttgcgaggatgactctcaaattattacactcacggcattcgttaaccaatgcctatggtgtcataaacgagtatccgtgtccgctattttattaactactgataacaaaatattagtatgtaacagacgagatagttttctctattctgaaataattagaactagaaacatgtttagaaaaaaacgattatttctgaattattccaattatttgaacaaacaggaaagaagtatactatcgtcatttttttctctagatccagctactactgataatgatagaatagacgctatttatccgggtggcatacccaaaaggggtgagaatgttccagagtgtttatccagggaaattaaagaagaagttaatatagacaattcttttgtattcatagacactcggttttttattcatggcatcatagaagataccattattaataaattttttgaggtaatcttctttgtcggaagaatatctctaacgagtgatcaaatcattgatacatttaaaagtaatcatgaaatcaaggatctaatatttttagatccgaattcaggtaatggactccaatacgaaattgcaaaatatgctctagatactgcaaaacttaaatgttacggccatagaggatgttattatgaatcattaaaaaaattaactgaggatgattgattagaaaatataaattaatttaccatcgtgtatttttataacgggattgtccggcatatcatgtagatagttaccgtctacatcgtatactcgaccatctacgcctttaaatcctctatttattgacattaatctattagaattggaataccaaatattagtaccctcaattagtttattggtaatattttttttagacgatagatcgatggctcttgaaaccaaggttttccaaccggactcattgtcgatcggtgaaaagtctttttcattagcatgaatccattctaatgatgtatgtttaaacactctaaacaattggacaaattcttttgatttgctttgaatgatttcaaataggtcttcgtctacagtaggcataccattagataatctagccattataaagtgcacgtttacatatctacgttctggaggagtaagaacgtgactattgagacgaatggctcttcctactatctgacgaagagacgcctcgttccatgtcatatctaaaatgaagatatcattaattgagaaaaaactaataccctcgcctccactagaagagaatacgcatgttttaatgcattctccgttagtgtttgattcttggttaaactcagccaccgccttgattctagtatcttttgttctagatgagaactctatattagagataccaaagactttgaaatatagtaataagatttctattcctgactgattaacaaatggttcaaagactagacatttaccatgggatgctaatattcccaaacatacatctataaatttgacgcttttctcttttaattcagtaaatagagagatatcagccgcactagcatcccctttcaatagttctccctttttaaaggtatctaatgcggatttagaaaactctctatctcttaatgaatttttaaaatcattatatagtgttgctatctcttgcgcgtattcgcccggatcacgattttgtctttcaggaaagctatcgaacgtaaacgtagtagccatacgtctcagaattctaaatgatgatatacctgtttttatttcagcgagtttagccttttgataaatttcttcttgctttttcgacatattaacgtatcgcattaatactgttttcttagcgaatgatgcagacccttctacgtcatcaaaaatagaaaactcgttattaactatatacgaacatagtcctcctagtttggagactaattctttttcatcgactagacgtttattctcaaatagtgattggtgttgtaaggatcctggtcgtagtaagttaaccaacatggtgaattcttgcacactattgacgataggtgtagccgataaacaaatcatcttatggttttttaacgcaatggtcttagataaaaaattatatactgaacgagtaggacggatcttaccatcttctttgattaatgatttagaaatgaagttatgacattcatcaatgatgacgcatattctactcttggaattaatagttttgatattagtaaaaaatttatttctaaaattttgatcatcgtaattaataaaaatacaatccttcgttatctctggagcgtatctgagtatagtgttcatccaaggatcttctatcaaagcctttttcaccaataagataatagcccaattcgtataaatatccttaagatgtttgagaatatatacagtagtcattgttttaccgacacccgtttcatggaacaataaaagagaatgcatactgtctaatcctaagaaaactcttgctacaaaatgttgataatccttgaggcgtactacgtccgaccccatcatttcaacgggcatattagtagttctgcgtaaggcataatcgatataggccgcgtgtgatttactcatttatgagtgataagtaataactatgttttaaaaatcacagcagtagtttaactagtcttctctgatgtttgttttcgatactttttgaatcagaagtcatactagaataaagcaacgagtgaacgtaatagagagcttcgtatactctattcgaaaactctaagaacttattaatgaattccgtatccactggattgtttaaaatactaaattgaacactgttcacatccttccaagaagaagacttagtgacggacttaacatgagacataaataaatccaaattttttttacaaacatcactagccaccataatggcgctatctttcaaccagctatcgcttacgcattttagcagtctaacatttttaaagagactacaatatattctcatagtatcgattacacctctaccgaataaagttggaagtttaataatacaatatttttcgtttacaaaatcaaataatggtcgaaacacgtcgaaggttaacatcttataatcgctaatgtatagattgttttcagtgagatgattattagatttaatagcatctcgttcacgtttgaacagtttattgcgtgcgctgaggtcggcaactacggcgtccgctttagtactcctcccataatactttacgctattaatctttaaaatttcatagactttatctagatcgctttctggtaacatgatatcatgtgtaaaaagttttaacatgtcggtcggcattctatttagatcattaactctagaaatctgaagaaagtaattagctccgtattccagactaggtaatgggcttttacctagagacagattaagttctggcaatgtttcataaaatggaagaaggacatgcgttccctcccggatattttttacaatttcatccatttacaactctatagtttgttttcattattattagttattatctcccataatcttggtaatacttaccccttgatcgtaagataccttatacaggtcattacatacaactaccaattgtttttgtacataatagattggatggttgacatccatggtggaataaactactcgaacagatagtttatctttccccctagatacattagccgtaatagttgtcggcctaaagaatatctttggtgtaaagttaaaagttagggttcttgttccattattgctttttgtcagtagttcattataaattctcgagatgggtccgttctctgaatatagaacatcatttccaaatctaacttctagtctagaaataatatcggtcttattcttaaaatctattcccttgatgaagggatcgttaatgaacaaatccttggcctttgattcggctgatctattatctccgttatagacgttacgttgactagtccaaagacttacaggaatagatgtatcgatgatgttgatactatgtgatatgtgagcaaaaattgttctcttagtggcatcgctatatgttccagtaatggcggaaaactttttagaaatgttatatataaaagaattttttcgtgttccaaacattagcagattagtatgaagataaacactcatattatcaggaacattatcaatttttacatacacatcagcatcttgaatagaaacgataccatcttctggaacctctacgatctcggcagactccggataaccagtcggtgggccatcactaacaataactagatcatccaacaatctactcacatatgcatctatataatctttttcatcttgtgagtaccctggatacgaaataaatttattatccgtatttccataataaggtttagtataaacagagagcgatgttgccgcatgaacttcagttacagtcgccgttggttggtttatttgacctattactctcctaggtttctctataaatgatggtttaatttgtacattcttaaccatatatccaataaagctcaattcaggaacataaacaaattctttgttgaacgtttcaaagtcgaacgaagagtcacgaataacgatatcggatactggattgaaggttaccgttacggtaatttttgaatcggatagtttaagactgctgaatgtatcttccacatcaaacggagttttaatataaacgtatactgtagatggttctttaatagtgtcattaggagttaggccaatagaaatatcattaagttcactagaatatccagaatgtttcaaagcaattgtattattgatacaattattatataattcttcgccctcaatttcccaaataacaccgttacacgaagagatagatacgtgattaatacatttatatccaacatatggtacgtaactgaatcttcccatacctttaacttctggaagttccaaactcagaaccaaatgattaagcgcagtaatatactgatccctaatttcgaagctagcgatagcctgattgtctggaccatcgtttgtcataactccggatagagaaatatattgcggcatatataaagttggaatttgactatcgactgcgaagacattagaccgtttaatagagtcatccccaccgatcaaagaattaatgatagtattattcattttctatttaaaatggaaaaagcttacaataaactccgtagagaaatatctataatttgtgagttttccttaaagtaacagcttccgtaaacgccgtctttatctcttagtaggtttattgtatttatgaccttttccttatcttcatagaatactaaaggcaacaaagaaatttttggttcttctctaagagctacgtgagacttaaccatagacgccaacgaatccctacatattttagaacagaaataccctacttcaccacccttgtatgtctcaatactaataggtctaaaaaccaaatcttgattacaaaaccaacacttatcaattacactatttgtcttaatagacacatctgccatagatttataatactttggtagtatacaagcgagtgcttcttctttagcgggcttaaagactgctttaggtgctgaaataaccacatctggaaggcttactcgcttagccatttaattacggaactatttttttatacttctaatgagcaagtagaaaacctctcatctacaaaaacgtactcgtgtccataatcctctaccatagttacacgttttttagatctcatatgtgctaaaaagttttcccatactaattggttactattatttttcgtataatttttaacagtttgaggttttagatttttagttacagaagtgatatcgaatattttatccaaaaagaatgaataattaattgtcttagaaggagtgttttcttggcaaaagaataccaagtgcttaaatatttctactacttcattaatcttttctgtactcagattcagtttctcatcttttacttgattgattatttcaaagactaacttataatcctttttatttattctctcgttagccttaagaaaactagatacaaaatttgcatctacatcatccgtggatatttgatttttttccatgatatccaagagttccgagataatttctccagaacattgatgagacaataatctccgcaatacatttctcaaatgaataagtttattagacacatggaagtttgactttttttgtacctttgtacatttttgaaatacagactcgcaaaaaatacaatattcatatccttgttcagatactataccgttgtgtctacaaccgctacataatcgtagattcatgttaacactctacgtatctcgtcgtccaatattttatataaaaacattttatttctagacgttgccagaaaatcctgtaatatttttagttttttgggctgtgaataaagtatcgccctaatatggttaccgtcttccgccaatatagtagttaaattatccgcacatgcagaagaacaccgcttaggcggattcagtacaatgttatatttttcgtaccaactcatttaaatatcataatctaaaatagttctgtaatatgtctagcgctaatatattgatcataatcctgtgcataaattaagatacaacaatgtctcgaaatcatcgacatggcttcttccatagttagaagatcgtcgtcaaagttagcaacgtgattcatcaacatttgctgttttgaggcagcaaatactgaaccgtcgccattcaaccattcataaaaaccatcgtctgaatccattgataatttcttgtactggtttttgagagctcgcatcaatctagcatttctagctcccggattgaaaacagaaagaggatcgtacatccagggtccattttctgtaaatagaatcgtataatgtcccttcaagaagatatcagacgatccacaatcaaagaattggtctccgagtttgtaacaaacagcggactttaacctatacatgataccgtttagcataatttctggtgatacgtcaatcggagtatcatctattagagatctaaagccggtgtaacattctccaccaaacatattcttattctgacgtcgttctacataaaacatcattgctccattaacgataacaggggaatgaacagcactacccatcacattagttcccaatggatcaatgtgtgtaactccagaacatcttccatatcctatgttaggaggagcgaacaccactcttccactattgccatcgaatgccatagaataaatatccttggaattgatagaaatcggactgtcggatgttgtgatcatcttcataggattaacaactatgtatggtgccgcctgaagtttcatatcgtaactgatgccgtttataggtctagccacagaaaccaacgtaggtctaaatccaactatagacaaaatagaagccaatatctgttcctcatctgtcataacttgagagcatccagtatgaataatcttcattagatggggatctaccgcatcatcatcgttacaataaaaaattcccattctaatgttcataattgcttttctaatcatggtatgcatgtttgctctctgaatctctgtggaaattagatctgatacacctgtaatcactatcggattatcctccgtaagacgattaaccaacaacatataattataagactttacttttctaaattcataaagttgctggattaggctataggtgtctccatgtacatacgcgttctcgagcgcaggaagtttaataccgaatagtgccatcagaataggatgaatatagtaattagtttctggttttctataaataaaagacaaatcttgtgaactagacatatcggtaaaatgcatggattggaatcgtgtagtcgacagaagaatatgatgattagatggagagtatattttatctaactctttgagttggtcaccgattctaggactagctcgagaatgaataagtactaaaggatgagtacatttcacagaaacactagcattgttcaatgtgctctttacatgggtaaggagttgaaatagctcgtttctatttgttctgacaatatttagtttattcataatgttaagcatatcctgaatagtaaagttagatgtgtcatacttgttagtagttagatatttagcaattgcattcccatcatttctcaatctcgtactccaatcatgtgtagatgctacttcgtcgatggaaaccatacaatcctttttgataggctgttgagattgatcatttcctgcacgtttaggtttggtacgttgatttctagcccctgcggatataaagtcatcgtctacaatttgggacaatgaattgcatacactacaagacaaagatttatcagaagtgtgaatatgatcttcatctaccaaagaaagagtttgattagtataactagattttagtcctgcgttagatgttaaaaaaacatcgctattgaccacggcttccattatttatattcgtagtttttactcgaaagcgtgattttaatatccaatcttattacttttggaatcgttcaaaacctttgactagttgtagaatttgatctattgccctacgcgtatactcccttgcatcatatacgttcgtcaccagatcgtttgtttcggcctgaagttggtgcatatctctttcaacattcgacatgagatccttaagggccatatcgtctagattttgttgagatgctgctcctggatttggattttgttgtgctgttgtacatactgtaccaccagtaggtgtaggagtacatacagtggccacaataggaggttgagaaagtgtaaccgttggagtagtacaagaaatacttccatccgattgttgtgtacatgtagttgttggtaacgtctgagaaggttgggtagatggcggcgtcgtcgttttttgatctttattaaatttagagataatatcctgaacagcattgctcggcgtcaacgctggaaggagtgaactcgccggcgcatcagtatcttcagacagccaatcaaaaagattagacatatcagatgatgtattagtttgttgtcgtggttttggtgtaggagcagtactactaggtagaagaataggagccgatgtagctgttggaaccggctgtggagttatatgaatagttggttgtagcggttggataggctgtctgctggcggccatcatattatctctagctagttgttctcgcaactgtctttgataatacgactcttgagactttagtcctatttcaatcgcttcatcctttttcgtatccggatccttttcttcagaataatagattgacgactttggtgtagaggattctgccagcctctgtgagaacttgttaaagaagtccatttaaggctttaaaattgaattgcgattataagattaaatggcagacacagacgatattatcgactatgaatccgatgatctcaccgaatacgaggatgatgaagaagaggaagaagatggagagtcactagaaactagtgatatagatcccaaatcttcttataagattgtagaatcagcatccactcatatagaagatgcgcattccaatcttaaacatatagggaatcatatatctgctcttaaacgacgctatactagacgtataagtctatttgaaatagcgggtataatagcagaaagctataacttgcttcaacgaggaagattacctctagtttcagaattttctgacgaaacgatgaagcaaaatatgctacatgtaattatacaagagatagaggagggttcttgtcctatagtcatcgaaaagaacggagaattgttgtcggtaaacgattttgacaaagatggtctaaaattccatctagactatattatcaaaatttggaaacttcaaaaacgatattagaatttatacgaatatcgttctctaaatgtcacaatcaagtctcgcatgttcagcaatttattgtcgtactttatatcgtgttcattaacgatatcttgcaaaatagtaatgattctatcttccttcgatagatattcttcagagattattgtcttatattctttcttgttatcagatatgaatttgataagactttgaacattattgatacccgtctgtttaattttttctacagatattttagttttggcagattctatcgtatctgtcaatagacatccaacatcgacattcgacgtcaattgtctataaatcaacgtataaattttagaaataacattagcgaattgttgtgcgttgatgtcgttattctgaaacagtatgattttaggtagcattttcttaacaaagagaacgtatttattgttactcagttgaacagatgatatatccagattactaacgcatctgattccgtataccaaactttcagaagaaatggtatacaattgtttgtattcattcaatgtctctttttcagaaattagtttagagtcgaatactgcaataattttcaagagatagttttcatcagataagattttatttagtgtagatatgataaaactattgttttgttggagaacttgatacgccgcgttctctgtagtcgacgctctcaaatgggaaacaatctccattatttttttggaatcggatactatatcttcggtatcttgacgcagtctagtatacatagagttaagagagattagagtttgtacattaagcaacatgtctctaaatgtggctacaaacttttcctttttcacatcatctagtttattatataccgatttcacaacggcaccagatttaaggaaccagaatgaaaaactctgataactacaatatttcatcatagttacgattttatcatcttctatagttggtgtaatagcgcatacctttttctccaagactggaaccaacgtcataaaaatgtttaaatcaaaatccatatcaacatctgatgcgctaagaccagtctcgcgttcaagattatctttactaatggtgacgaactcatcgtataaaactctaagtttgtccattatttatttacagatttagttgtttaatttatttgtgctcttccagagttgggatagtatttttctaacgtcggtattatattattaggatctacgttcatatgtatcataatattaatcatccacgttttgataaatctatctttagcttctgaaataacgtatttaaacaaaggagaaaaatatttagctacggcatcagacgcaataacattttttgtaaatgtaacgtatttagacgacagatcttcgttaaaaagttttccatctatgtagaatccatcggttgttaacaccattcccgcgtcagattgaataggagtttgaatagtttgttttggaaatagatccttcaataacttatagttgggtgggaaaaaatcgattttatcactagactctttcttttttactatcattacctcatgaactatttcttgaatgagtatatgtattttctttcctatatcggacgcgttcattggaaaatataccatgtcgttaactataagaatatttttatcctcgtttacaaactgaataatatcagatgtagttcgtaaacgaactatatcatcaccagcacaacatctaactatatgatatccactagtttcctttagccgtttattatcttgttccatattagcagtcattccatcatttaagaaggcgtcaaagataatagggagaaatgacattttggattctgttacgactttaccaaaattaaggatatacggacttactatctttttctcaacgtcaatttgatgaacacacgatgaaaatgtgcttctatgagattgatcatgtagaaaacaacaagggatacaatatttccgcatatcatgaaatatattaagaaatcccaccttattatatttccccaaaggatccatgcacgtaaacattatgccgttatcattaataaagacttctttctcatcggatctgtaaaagttgttactgatttttttcattccaggatctagataattaataatgatgggttttctattcttattctttgtattttggcatatcctagaccagtaaacagtttccactttggtaaaatcagcagacttttgaacgctattaaacatggcattaatggcaataactaaaaatgtaaaatatttttctatgttaggaatatggtttttcactttaatagatatatggtttttggccaaaatgatagatatttttttatccgaggatagtaaaatattattagtcgccgtctctataaaaatgaagctagtctcgatatccaattttattctagaattgataggagtcgccaaatgtaccttatacgttatatctcccttgatgcgttccatttgtgtatctatatcggacacaagatctgtaaatagttttacgttattaatcatcacggtatcgccgtcgctagataacgctaatgtaccatccaagtcccaaatggagagatttaactgttcatcgtttagaataaaatgattaccggtcatattaataaagtgttcatcgtatctagataacaacgacttataattaatgtccaagtcttgaactcgctgaatgatcttttttaacccagttagttttagattggtacgaaatatattgttaaactttgattctacagtaatgtccaaatctagttgtggaaatacttccatcaacattgtttcaaacttgataatattattatctacatcttcgtacgatccaaattccggaatagatgtatcgcacgctctggccacccagataaccaaaaagtcacacgctccaggatatacattgtataaaaagctatcgttttttagtagggtttttttctgcgtgtatacgaagggattaaaaatagtattatcaacgtaactatattccaaattattcttatgagaatagataataatatcgtccttaatatctaacaaatttcctaaatatccctttaattgagtcattcgaagcgtcaatagaatatgtctcttaactatttccggctgttgtatatttaaatgacttcgtaaaaaataatatatgggcgacttctcatctatgtaatcatatggagtgagatatagggctcgttctacctcctgccccttacccacctgtaataccaattgcggacttactatatatcgcatatttatatcgtggggtaaagtgaaaatctactaccgatgatgtaagtcttacaatgttcgaaccagtaccagatcttaatttggaggcctccgtagaactaggggaggtaaatatagatcaaacaacacctatgataaaggagaatagcggttttatatcccgcagtagacgtctattcgcccatagatctaaggatgatgagagaaaactagcactacgattctttttacaaagactttattttttagatcatagagagattcattatttgttcagatgcgttgacgctgtaaaagacgtcactattaccaaaaaaaataacattatcgtggcgccttatatagcacttttaactatcgcatcaaaaggatgcaaacttacagaaacaatgattgaagcattctttccagaactatataatgaacatagtaagaaatttaaattcaactctcaagtatccatcatccaagaaaaactcggataccagtttggaaactatcacgtttatgattttgaaccgtattactctacagtagctctggctattcgagatgaacattcatctggcatttttaatatccgtcaagagagttatctggtaagttcattatctgaaataacatatagattttatctaattaatctaaaatctgatcttgttcaatggagtgctagtacgggcgctgtaattaatcaaatggtaaatactgtattgattacagtgtatgaaaagttacaactggtcatagaaaatgattcacaatttacatgttcattggctgtggaatcaaaacttccaataaaattacttaaagatagaaatgaattatttacaaaattcattaacgagttaaaaaagaccagttcattcaagataagcaaacgcgataaggatacgctactaaaatattttacttaggactggagttagaatttatagacgactcatttcgtttatcattgttactattattactattactatcattattagtgttggcattattagtattcttcttgtcatcttgttcagaaatatacagcaatgctatacctaatactaaatacattatcatgctcgcaatggctctaacaacaacgaaccaaaatgaatttggtcgtagcttttgttcacaaaaatacataaagaaatgtctacataaatctatggcgccattggctacttgaaatagcgccagtcctcctacagattttaatatagctgtataacatgacatttattcatcatcaaaagagacagagtcaccatctgtcatatttagattttttttcatgtgttcaaagtatcctctactcatttcattataatagtttatcatacttagaattttaggacggatcaatgagtaagacttgactagatcgtcagtagtaatttgtgcatcgtctattctgcatccgcttcgtcgaataatgtatagcatcgctttgagattctccatagctatcaagtctttatacaatgacatggaaatatctgtgaatactttatacttctccaacatcgatgccttaacatcatcgcctactttagcattgaaaatacgttctattgtgtagatggatgtagcaagatttttaaacaacaatgccatcttacacgatgattgcctcaagtctccaatcgtttgtttagaacgattagctacagagtccaatgcttggctgactagcatattattatctttagaaattgtattcttcaatgaggcgtttatcatatctgtgatttcgttagtcatattacagtctgactgggttgtaatgttatccaacatatcacctatggatacggtacacgtaccagcatttgtaataatcctatctaagatgttgtatggcattgcgcagaaaatatcttctcctgtaatatctccactctcgataaatctactcagattattcttaaatgccttattctctggagaaaagatatcagtgtccatcatttcattaatagtatacgcagaaaagataccacgagtatcaattctatccaagatacttatcggttccgagtcacagataatggtttcctctccttcgggagatcctgcatagaaatatctaggacaatagtttctatactgtctgtaactctgataatctctaaagtcactaactgataccatgaaattgagaagatcaaacgctgaagtaattaatttttctgcctcgtttttactacaactagttttcatcaatgtagtgacgatgtattgtttagttacttttggtctaatactgatgatagagatattattgcttcccataatggatcttctagtagtcaccttaaagcccattgatgcgaatagcagatagataaagtcttggtatgactcctttctaatatagtacggactacctttgtcacccaactttatacccacataagccataacaacctctttaatagccgtttcatgaggtttatcagccatgagcctgagtagttggaagaatctcatgaatcccgtctcagaaagtcctatatgcatgatagatttatctttcctgggaaactctcgtatagtcatagatgaaatactctttaaagtttctgaaataagattagtaacagtcttacctccgactactctaggtaacaaacaaactctaataggtgttttctctgcggagataatatcagaaaggatagagcaataagtagtattattgtgattataaagaccgaatacataacaggtagaatttataaacatcatgtcctgaaggtttttagacttgtattcctcgtaatccataccgtcccaaaacatggatttggtaactttgatagccgtagatctttgttccttcgccaacaggttaaagaaattaataaagaatttgtggtttctacctatgtctacaaattgcacgtttggaagcgccacggttacattcactgcagcattttgaggatcgcgagtatgaagtacgatgttattgtttactggtatatctggaaagaaatctaccagtctaggaataagagattgatatcgcatagaaatagtaaagtttataatctcatcatcgaagagcattttgttaccattgtaataaatatccactctgtcatatgtataaatgaagtactgttcaaacatgatgagatgtttatatgttggcatagtagtgagatcgacgtttggtaatggcaatgtattaagattaactccataatgtctagcagcatctgcgatgttataagcgtcgtcaaagcggggtcgatcttgtattgttatatattgtctaacacctataagattatcaaaatcttgtctgcttaatacaccgttaacaatttttgccttgaattcttttattggtgcattaataacatccttatagaggatgttaaacaaataagtgttatcaaagttaagatctggatatttcttttctgctagaacatccattgagtcggagccatctggtttaatataaccaccgataaatctagctctgtattctgtatccgtcaatctaatattaagaaggtgttgagtgaaaggtggaagatcgtaaaagctgtgagtattaatgataggattagtttccgaactaatgttaattggggtattaataatatctatatttccagcgttaagtgtaacattaaacagttttaattcacgtgacgtggtatcaattaaataattaatgcccaatttggatatagcagcctgaagctcatcttgtttagttacggatcctaatgagttattaagcaatatatcgaacggatgaacgaaggttgttttaagttggtcacatactttgtaatctagacatagatgcggaagaacggtagaaactatacgaaataaatattcagagtcctctaattgatcaagagtaactattgacttaataggcatcatttatttagtattaaatgacgaccgtaccagtgacggatatacaaaacgatttaattacagagttttcagaagataattatccatctaacaaaaattatgaaataactcttcgtcaaatgtctattctaactcacgttaacaacgtggtagatagagaacataatgccgccgtagtgtcatctccagaggaaatatcctcacaacttaatgaagatctatttccagatgatgattcaccggccactattatcgaacgagtacaacctcatactactattattgacgatactccacctcctacgtttcgtagagagttattaatatcggaacaacgtcaacaacgagaaaaaagatttaatattacagtatcgaaaaatgctgaagcaataatggaatctagatctatgataacttctatgccaacacaaacaccatccttgggagtagtttatgataaagataaaagaattcagatgttagaggatgaagtggttaatcttagaaatcaacgatctaatacaaaatcatctgataatttagataattttaccaaaatactatttggtaagactccgtacaaatcaacagaagttaataagcgtatagccatcgttaattatgcaaatttgaacgggtcccccttatcagtcgaggacttggatgtttgttcggaggatgaaatagatagaatctataaaacgattaaacaatatcacgaaagtagaaaacgaaaaattatcgtcactaacgtgattattattgtcataaacattatcgagcaggcattgctaaaactcggatttgaagaaatcaaaggactgagtaccgatatcacttcagaaattatcgatgtggagatcggagatgactgcgatgctgtagcatcaaaactaggaatcggtaacagtccggttcttaatattgtattgtttatactcaagatattcgttaaacgaattaaaattatttaatttaatacattcccatatccagacaacaatcgtctggattaatctgttcctgtcgtctcataccggacgacatattaatctttttattagtgggcatctttttagatggtttctttttcccagcattaactgagtcgatacctagaagatcgtgattgatctctccgaccattccacgaacttctaattggccgtctctgacggtaccataaactattttaccagcattagtaacagcttggacaatctgaccatccatcgcattgtacgatgtagtagtaactgttgttctacgtctaggagcaccagaagtatttttggagcccttggatgttgatgtagaagaagacgaggattttgattttggtttacatgtaatacattttgaactctttgattttgtatcacatgcgccggcagtcacatctgtttgagaattaagattattgttgcctcctttgacggctgcatctccaccgatttgcgctagtagatttttaagctgtggtgtaatcttattaactgtttcgatataatcatcgtaactgcttctaacggctaaattttttttatccgccatttagaagctaaaaatatttttatttatgcagaagatttaactagattatacaatgaactaatatgatccttttccagattatttacaaacttggtattttttggttctggaggaggcgaatttaaattcggacttggattcggattttgtaagttcttgatcttattatacatcgagtataggatggcgacagtaactgctacacaaataccgatcaaaagaagaataccaatcatttattgacaataacttcactattgatcaagtatgcaatatatcatcttttcactaaataagtagtaataatgattcaacaatgtcgagatatatggacgataataatttagttcatggaaatatcgctatgattggtgtgaatgactccgctaactctgtggggtgcgcagtgctttccccacatagaataaattagcattccgactgtgataataataccaagtataaacgccataatactcaatactttccatgtacgagtgggactggtagacttactaaagtcaataaaggcgaagatacacgaaagaatcaaaagaatgattccagcgattagcacgccggaaaaataatttccaatcataagcatcatgtccatttaactaataaaaattttaaatcgccgaatgaacaaagtggaatataaaccatataaaaacaatagtttgtactgcaaaaataatatctatttttgttttcgaagatatggtaaaattaaatagtagtacacagcatgttataactaacagcagcaacggctcgtaattacttatcatttactagacgaaaaggtggtgggatattttcttgctcaaataatacgaatatatcacccatccattttatgcgatgtttatatactctaatctttaatagatctatagacgacgggtttaccaacaatatagattttatcgattcatctaatttaaacccttccttaaacgtgaatgatctattatctggcataacgatgaccctacctgatgaatcggacaatgtactgggccatgtagaataaattatcaacgaattatcgtctacgaacatttatatcatttgttttaattttaggacgcgaataaatggatataaaatagaaaataacagatattacaaccagtgttatggccgcgcccaaccaggtaggcagttttattttatcttttactacaggttctcctggatgtacgttaccaacggcggacgtagttctagtacaattagacgtaagttccgcttgggaattttttaacgctaaagagttaacgttaatcgtgcacccaacgtatttacatctagttcgttgaacatcttgattataatataaccattttctatctctagattcgtcagtgcactcatgtaaccaacataccctaggtcctaaatatttatctccggaattagattttggataattcgcgcaccaacaatttctatttcctttatgatcgttacaaaagacgtataatgccgtatccccaaaagtaaaataatcaggacgaataattctaataaactcagaacaatatctcgcatccatatgtttggagcaaatatcggaataagtagacatagccggtttccgttttgcacgtaaccattctaaacaattggggtttccaggatcgtttctacaaaatccagtcatgaaatcgtcacaatgttctgtcttgtaattattattaaatatttttggacagtgtttggtatttgtcttagaacaacattttgccacgctatcactatcgcccaggagataatccttttttataaaatgacatcgttgcccggatgctatataatcagtagcgtgttttaaatccttaatatattcaggagttacctcgttctgataatagattaatgatccaggacgaaatttgaaagaactacatggttctccatgaattaatacatattgtttagcaaattcaggaactataaaactactacaatgatctatcgacataccatctatcaaacaaaacttgggtttaatttctcccggagatgtttcataatagtacgtataactttcttctgcaaacttaacagctctattatattcaggataattaaaacctaattccatatatttgtctcgtatatctgctattcctggtgctattttgattctattaagagtaacagctgcccccattcttaataatcgtcagtatttaaactgttaaatgttggtatatcaacatctaccttatttcccgcagtataaggtttgttgcaggtatactgttcaggaatggttacatttatacttcttctatagtcctgtctttcgatgttcatcacatatgcaaagaacagaataaacaaaataatgtaagaaataatattaaatatctgtgaattcgtaaatacattgattgccataataattacagcagctacaatacacacaatagacattcccacagtgttgccattacctccacgatacatttgagttactaagcaataggtaataactaagctagtaagaggcaatagaaaagatgagataaatatcatcaatatagagattagaggagggctatatagagccaagacgaacaaaatcaaaccgagtaacgttctaacatcattatttttgaagattcccaaataatcattcattcctccataatcgttttgcatcatacctccatctttaggcataaacgattgctgctgttcctctgtaaataaatctttatcaagcactccagcacccgcagagaagtcgtcaagcatattgtaatatcttaaataactcatttatatattaaaaaatgtcactattaaagatggagtataatctttatgccgaactaaaaaaaatgacttgtggtcaacccctaagtctttttaacgaagacggggatttcgtagaagttgaaccgggatcatcctttaagtttctgatacctaagggattttacgcctctccttccgtaaagacgagtctagtattcgagacattaacaacgaccgataataaaatcactagtatcaatccaacaaatgcgccaaagttatatcctcttcaacgcaaagtcgtatctgaagtagtttctaatatgaggaaaatgatcgaatcaaaacgtcctctatacattactcttcacttggcgtgtggatttggtaagactattaccacgtgttatcttatggctacacacggtagaaaaaccgtcatttgcgtacccaataaaatgttaatacatcaatggaagacacaggtagaggcagtcggattggaacataagatatccatagatggagtaagtagtctattaaaggaactaaagactcaaagtccggatgtattaatagtagtcagtagacatctgacaaacgatgccttttgtaaatatatcaataagcattatgatttgttcatcttggatgaatcacatacgtataatctgatgaacaatacagcagttacaagatttttagcgtattatcctccgatgatgtgttattttttaactgctacacctagaccatctaaccgaatttattgtaacagtattattaatattgccaagttatccaatctaaaaaaaactatctatgcagtagatagtttttttgagccatattccacagataatattagacatatggtaaaacgactagatggaccatctaataaatatcatatatataccgagaagttattatctgtagacgagcctagaaatcaacttattcttgataccctggtagaagaattcaagtcaggaactattaatcgcattttagttattactaaactacgtgaacatatggtattattctacaaacgattattagattttttcggaccagaggttgtatttataggagacgcccaaaatagacgtactccagatatggtcaaatcaatcaaggaactaaatagatttatattcgtatccaccttattttattccggtactggtttagatattcctagtttggattcgttgttcatttgctcggcagtaatcaacaatatgcaaatagagcaattactagggagggtatgtcgagaaacagaactattagataggacggtatatgtatttcctaacacatccatcaaagaaataaagtacatgataggaaatttcatgcaacgaattattagtctgtctgtagataaactaggatttaaacaaaaaagttatcggaaacatcaagaatccgatcccacttctgtatgtacaacatcctccagagaagaacgtgtattaaatagaatatttaactcgcaaaatcgttaagaagtttaagcgacgatccgcatgctgcgcaggccagtgtattacccctcatagtattaatataatccaatgatacttttgtgatgtcggaaatcttaaccaatttagactgacaggcagaacacgtcatgcaatcatcatcgtcatcgataactgtagtcttgggcttctttttgcggctcttcattccggaacgcacattggtgctatccatttaggtagtaaaaaataagtcagaatatgccctataacacgatcgtgcaaaacctggtatatcgtctctatctttatcacaatatagtgtatcgacatttttattattattgacctcgtttatcttggaacatggaatgggaacatttttgttatcaacggccacctttgccttaattccagatgttgtaaaattataactaaacagtctatcatcgacacaaatgaaattcttgtttagacgtttgtagtttacgtatgcggctcgttcgcgtctcattttttcagatattgcaggtactataatattaaaaataagaatgaaataacataggattaaaaataaagttatcatgacttctagcgctgatttaactaacttaaaagaattacttagtctgtacaaaagtttgagattttcagattctgcggctatagaaaagtataattctttggtagaatggggaacatctacttactggaaaataggcgtgcaaaaggtagctaatgtcgagacgtcaatatctgattattatgatgaggtaaaaaataaaccgtttaatattgatccgggctattacattttcttaccggtatattttgggagcgtctttatttattcgaagggtaaaaatatggtagaacttggatctggaaactcttttcaaataccagatgatatgcgaagtgcgtgtaacaaagtattagacagcgataacggaatagactttctgagatttgttttgttaaacaatagatggataatggaagatgctatatcaaaatatcagtctccagttaatatatttaaactagctagtgagtacggattaaacatacccaaatatttagaaattgaaatagaggaagacacattatttgacgacgagttatactctattatagaacgctctttcgatgataaatttccaaaaatatccatatcgtatattaagttgggagaacttagacggcaagttgtagactttttcaaattctcattcatgtatattgagtccatcaaggtagatcgtataggagataatatttttattcctagcgttataacaaaatcaggaaaaaagatattagtaaaagatgtagaccatttaatacgatccaaggttagagaacatacatttgtaaaagtaaaaaagaaaaacacattttccattttatacgactatgatggaaacggaacagaaactagaggagaagtaataaaacgaattatagacactataggacgagactattatgttaacggaaagtatttctctaaggttggtagtgcaggcttaaagcaattgactaataaattagatattaatgagtgcgcaactgtcgatgagttagttgatgagattaataaatccggaactgtaaaacgaaaaataaaaaaccaatcagcatttgatttaagcagagaatgtttgggatatccagaagcggattttataacgttagttaataacatgcggttcaaaatagaaaattgtaaggttgtaaatttcaatattgaaaatactaattgtttaaataacccgagtattgaaactatatatggaaactttaaccagttcgtctcaatctttaatgtcgtcaccgatgtcaaaaaaagattattcgagtgaaataatatgcgcctttgatataggtgcaaaaaatcctgccagaactgttttagaagtcaaggataactccgttagggtattggatatatcaaaattagactggagttctgattgggaaaggcgcatagctaaagatttgtcacaatatgaatacactacagttcttctagaacgtcagcctagaaggtcgccgtatgttaaatttatctattttattaaaggctttttatatcatacatcggctgccaaagttatttgcgtctcgcctgtcatgtctggtaattcatatagagatcgaaaaaagagatcggtcgaagcatttcttgattggatggacacattcggattgcgagactccgttccggatagacgcaaattagacgatgtagcggatagtttcaatttggctatgagatacgtattagataaatggaatactaattatacaccttataataggtgtaaatctagaaattacataaaaaaaatgtaataacgttagtaacgccattatggataatctatttacctttctacatgaaatagaagatagatatgccagaactatttttaactttcatctaataagttgcgatgaaataggagatatatatggtcttatgaaagaacgcatttcctcagaggatatgtttgataatatagtgtataataaagatatacatcctgccattaagaaactagtgtattgcgacatccaacttactaaacacattattaatcagaatacgtatccggtatttaacgattcttcacaagtgaaatgttgtcattatttcgacataaactcagataatagcaatattagctctcgtacagtagagatatttgagagggaaaagtcatctcttgtatcatatattaaaactaccaataagaagagaaaggtcaattacggcgaaataaagaaaactgttcatggaggcactaatgcaaattacttttccggtaaaaagtctgacgagtatctgagtactacagttagatccaacattaatcaaccttggatcaaaaccatctctaagaggatgagagttgatatcattaatcactctatagtaacgcgtggaaaaagctctatattacaaactatagaaattatttttactaatagaacatgtgtgaaaatattcaaggattctactatgcacattattctatccaaggacaaggatgaaaaggggtgtatacacatgattgacaaattattctatgtctattataatttatttctgttgttcgaagatatcatccaaaacgagtactttaaagaagtagctaatgttgtaaaccacgtactcacggctacggcattagatgagaaattattcctaattaagaaaatggctgaacacgatgtttatggagttagcaatttcaaaatagggatgtttaacctgacatttattaagtcgttggatcataccgttttcccctctctgttagatgaggatagcaaaataaagttttttaaggggaaaaagctcaatattgtagcattacgatctctggaggattgtataaattacgtgactaaatccgagaatatgatagaaatgatgaaggaaagatcgactattttaaatagcatagatatagaaacggaatcggtagatcgtctaaaagaattgcttctaaaatgaaaaaaaacactaattcagaaatggatcaacgactagggtataagtttttggtgcctgatcctaaagccggagttttttatagaccgttacatttccaatatgtatcgtattctaattttatattgcatcgattgcatgaaatcttgaccgtcaagcggccactcttatcgtttaagaataatacagaacgaattatgatagaaattagcaatgttaaagtgactcctccagattactcacctataatcgcgagtattaaaggtaagagttatgacgcattagccacgttcactgtaaatatctttaaagaggtaatgaccaaagagggtatatccatcactaaaataagtagttatgagggaaaagattctcatttgataaaaattccgctactaataggatacgggaataaaaatccacttgatacagccaagtatcttgttcctaatgtcataggtggagtctttatcaataaacaatctgtcgaaaaagtaggaattaatctagtagaaaagattacaacatggccaaaatttagggttgttaagccaaactcattcactttctcgttttcctccgtatcccctcctaatgtattaccgacaagatatcgccattacaagatatctctggatatatcacaattggaagcgttgaatatatcatcgacaaagacatttataacggtcaatattgttttgctgtctcaatatttatctagagtgagtctagaattcattagacgtagtttatcatacgatatgcctccagaagttgtctatctagtaaacgcgataatagatagtgctaaacgaattactgaatctattactgactttaatattgatacatacattaatgacctggtggaagctgaacacattaaacaaaaatctcagttaacgattaacgagttcaaatatgaaatgctgcataactttttacctcatatgaactatacacccgatcaactaaagggattttatatgatatctttactaagaaagtttctctactgtatcttccacacttctagatatccagatagagattcgatggtttgtcatcgcatcctaacgtacggcaaatattttgagacgttggcacatgatgaattagagaattacataggcaacatccgaaacgatatcatgaacaatcacaagaacagaggcacttacgcggtaaacattcatgtactaacaactcccggacttaatcacgcgttttctagcttattgagtggaaagttcaaaaagtcagacggtagttatcgaacacatcctcactattcatggatgcagaatatttctattcctaggagtgttggattttatccggatcaagtaaagatttcaaagatgttttctgtcagaaaataccatccaagtcaatatctttacttttgttcatcagacgttccggaaagaggtcctcaggtaggtttagtatctcaattgtctgtcttgagttccattacaaatatactaacgtctgagtatttggatttggaaaagaaaatttgtgagtatatcagatcatattataaagatgatataagttactttgaaacaggatttccaatcactatagaaaatgctctagtcgcatctcttaatccaaatatgatatgtgattttgtaactgactttagacgtagaaaacggatgggattcttcggtaacttggaggtaggtattactttagttagggatcacatgaatgaaattcgcattaatattggagcgggaagattagtcagaccattcttggttgtggataacggagagctcatgatggatgtgtgtccggagttagaaagcagattagacgacatgacattctctgacattcagaaagagtttccgcatgtcatcgaaatggtagatatagaacaatttacttttagtaacgtatgtgaatcggttcaaaaatttagaatgatgtcaaaggatgaaagaaagcaatacgatttatgtgactttcctgccgaatttagagatggatatgtagcatcttcactagtgggaatcaatcacaattctggacccagagctattcttggatgtgctcaagctaaacaagctatctcttgtctgagttcggatatacgaaataaaatagacaatggaattcatttgatgtatccagagaggccaatcgtgattagtaaggctttagaaacttcaaagattgcggctaattgcttcggccaacatgttactatagcattaatgtcgtacaaaggtatcaatcaagaggatggaattatcatcaaaaaacaatttattcagagaggcggtctcgatattgttacagccaagaaacatcaagtagaaattccattggaaaactttaataacaaagaaagagataggtctaacgcctattcaaaattagaaagtaatggattagttagactgaatgctttcttggaatccggagacgctatggcacgaaatatctcatcaagaactcttgaagatgattttgctagagataatcagattagctttgatgtttccgagaaatataccgatatgtacaaatctcgcgttgaacgagtacaagtagaacttactgacaaagttaaggtacgagtattaaccatgaaagaaagaagacccattctaggagacaaatttaccactagaacgagtcaaaagggaacagtcgcgtatgtcgcggatgaaacggaacttccatacgacgaaaatggtatcacaccagatgtcattattaattctacatccatcttctctagaaaaactatatctatgttgatagaggttattttaacagccgcatattctgctaagccgtacaacaataagggagaaaaccgacctgtctgttttcctagtagtaacgaaacatccatcgatacatatatgcaattcgctaaacaatgttatgagcattcaaatccgaaattgtccgatgaagaattatcggataaaatcttttgtgaaaagattctctatgatcctgaaacggataagccttatgcatccaaagtattttttggaccaatttattacttgcgtctgaggcatttaactcaggacaaggcaaccgttagatgtagaggtaaaaagacgaagctcattagacaggcgaatgagggacgaaaacgtggaggaggtatcaagttcggagaaatggagagagactgtttaatagcgcatggtgcagccaatactattacagaagttttgaaagattcggaagaagattatcaagatgtgtatgtttgtgaaaattgtggagacatagcagcacaaatcaagggtattaatacatgtcttagatgttcaaaacttaatctctctcctctcttaacaaaaattgataccacgcacgtatctaaagtatttcttactcaaatgaacgccagaggcgtaaaagtcaaattagatttcgaacgaaggcctccttcgttttataaaccattagataaagttgatctcaagccgtcttttctggtgtaatattctagtttggtagtagatacatatcaatatcatcaaattcgagatccgaattataaaatgggcgtggattgttaactatagaatcggacgtctgatattcgaaaatctgtggagtttcaggttttggtggaggtgtaactgctacttgggatactgaagtctgatattcagaaagctgtggatgttctggttcggcatccaccgatggtgtcacatcactaatcggttcggtaacgtctgtggatggaggtgctacttctacagaacctgtagcctcagttgtcaacggagatacatttttaatgcgagaaaatgtataatttggtaatggtttcttatgtggatctgaagaagaggtaagatatctactagaaagataccgatcacgttctagttctcttttgtagaacttaactttttctttctccgcatctagttgatattccaacctcttcacgttactacgttcagattccaattcacgttcgcatgggttacctccgcagtttttacgagcgatttcacgttcagccttcatgcgtctctccctctctctatcgagtttatcagagcagtctttctgaaggcgatcgaactccataaatttctccaacgctttgattgtttccatagatttccgaagttcagcttttaggactgtgattctttttctttcgaattcacagctggatgtacaaccgtttccattaccgccatctctaagtttcttttctagatcggcaacatttcatccccatgccttttacattcctcgagtctactgtcgtcgaaatatcgttccagctccttttcgacatcaataactttagcacgttgtctctcaagctctcttttgtagttatctgattccctggcacgtttaagatcttcatgcaattgagtcagctcttaacttcctctcttgcttcttcgtcatagtacgcgcaatcactgtgagatccattgttaccacgtctacactcggcgagctcgcgtttaagagattcaatttcccgtttgtattggtccatgtttccattgctaccaccattagatttacaggctgctagttgtcgttcgagatcagaaatacgggttttcttggaattgatttcgtcgatgtacttggcatcgaaacacttattaagttctttttccaattctacgattttatttctttcgcgagtcaattccctcctgtagtaactatctgttttgtcagattcacgctctctacgtagactttcttgcaagttactaatttgttccctagcacgtccgagtttagttttatatgctgaatagagttctgattcatcctttgagcagatctctagcgatcgtttaagattcctaattctagtctttagcctatttacctcctcagaagatgttccgttaccgttgcgtttacactcgttaagctgtctatcaagatccatgattctatctctaagacgttgcatctctctttccatatcagcattgctttcattattacgtctgcagtcactcaactgtctttcaatatctgagattctatctctaagacgtcgcatctctctctgtttcggcattggtttcattattacgtttacagtcgttcaactgtctttcaagatctgatattctagattggagtctgctaatctctgtagcattttcacggcattcactcagttgtctttcaagatctgaaattttagattggagtctgctaatctctgtaagatttcctcctccgctctcgatgcagtcggtcaacttattctctagttctctaatacgcgaacgcagtgcatcaacttcttgcgtgtcttcctggttgcgtgtacattcatcgagatctctaacgcgtcgtcgttcttcctcaagttctctgcgtactacagaaagcgtgtccttatcttgttgatatttagcaatttctgattctagagtactgattttgcttacgtagttactaatatttgtcttggccttatcaagatcctccttgtatttgtcgcattccttgatatccctacgaagtctggacagttcccattcgacattacgacgtttatcgatttcagctcggagatcgtcatcgcgttgttttagccacatacgactgagttcaagttctcgttgacaagatccatctacttttccattcctaatagtatccagttccttttctagttctgaacgcatttctcgttccctatcaagcgattctctcaattctcggatagtcttcttatcaatttctaataaatctgaaccatcatctgtcccattttgaatatccctgtgttctttgatctcttttgtaagtcggtcgattctttcggttttataaacagaatccctttccaaagtcctaatcttactgagtttatcactaagttctgcattcaattcggtgagttttctcttggcttcttccaactctgttttaaactctccactatttccgcattcttcctcgcatttatctaaccattcaattagtttattaataactagttggtaatcagcgattcctatagccgttcttgtaattgtgggaacataattaggatcttctaatggattgtatggcttgatagcatcatctttatcattattagggggatggacaaccttaattggttggtcctcatctcctccagtagcgtgtggttcttcaataccagtgttagtaataggcttaggcaaatgcttgtcgtacgcgggcacttcctcatccatcaagtatttataatcgggttctacttcagaatattcttttctaagagacgcgacttcgggagttagtagaagaactctgtttctgtatctatcaacgctggaatcaatactcaagttaaggatagcgaatacctcatcgtcatcatccgtatcttctgaaacaccatcatatgacatttcatgaagtctaacgtattgataaatagaatcagatttagtattaaacagatccttaacctttttagtaaacgcatatgtatattttagatctccagatttcataatatgatcacatgccttaaatgtcagtgcttccatgatataatctggaacactaatgggtgacgaaaaagatacagcaccatatgctacgttgataaataaatctgaaccactaagtagataatgattaatgttaaggaaaagaaaatattcagtgtataggtatgtcttggcgtcatatcttgtactaaacacgctaaacagtttgttaatgtgatcaatttccaatagattaattagagcagcgggaataccaacaaacatattaccacatccgtattttctatgaatatcacatatcatgttaaaaaatcttgatagaagagcgaatatctcgtctgacttaatgagtcgtagttcagcagcaacataagtcataactgtaaatagaacatactttcctgtagtgttgattctagactccacatcaacaccattattaaaaatagttttatatacatctttaatctgctctccgttaatcgtcgaacgttctagtatacggaaacactttgatttcttatctgtagttaatgacttagtgatatcacgaagaatattacgaattacatttcttgtttttcttgagagacctgattcagaactcaactcatcgttccatagtttttctacctcagtggcgaaatctttggagtgcttggtacatttttcaataaggttcgtgacctccatttattataaaaaatttattcaaaacttaactacaatcgggtaattataaaatcgtagatctcccatgtggcggaatactaccatctatcgcatgtggatggacagtaggtaatggccatgggaacagtaatgtttgcatatttatctttcttgccagtattactgcatattgtcccaatgtttcgatgtgatgttctaacctatcaactgccgctgtatcacaacaatagtgtccgatgaaattaagattatgatccaatgtgtttaatatatgattatcaagtcttatacgatccgcgtcttttttgacaggatcaggttcttctacaggaagaagtttcggcctcttatgatattcatgtctgggaaacggtggtctagggtgaggctccggtatcggagtgggttttggattataatcatcatcgtctatgacatcatcttcgacttcgatatttattttgctatcttgatgatgtcctgtatcagttgcattttcagcactcgactgaatattagcgcattcattgtctattattaccatatttctaaacccaaaatgtatgtgttgaacatcagtactatcgttgatgagtcttatagcatgaattcgcttatcgttatcgggtttatcttctgtcaccttagcaattccttttttattaaactctacataatcatatccatttctattgtttgttctaatataaacgagtatagcatcattgctaaatttttcaatagtatcaaaaacagaatatcctaaaccatataatatatattcaggaacactcaaactaaatgtccaggattctcctaaatacgtaaactttaatagtgcgaaatcattcaaaaatctaccacttatagatagatagtacataaatgcgtatagtagtctacctatctctttattatgaaaaccggcattacgatcatatatgtcgtgatatacctgtgatccgtttacgttaaaccataaatacatgggtgatcctataaacatgaatttatttctaattctcagagctatagttaattgaccgtgtaatatttgcttacatgcatacttgatacgcttattaataagatttttatcattgctcgttatttcagaatcgtatatataaggagtaccatcgtgattcttaccagatattatacaaaatactatatataaaatatattgacccacgttagtaatcatataaatgtttaacgttttaaattttgtattcaatgatccattatcatacgctatcatggtcttgtaatattcattctttaaaatataatattgtgttagccattgcattggggctcctaatggagattttttattctcatccattttaggataggctttcataaagtccctaataacttcgtgaataatgtttctatgttttctactgatgcatgtatttgcttcgatttttttatcccatgtttcatctatcatagatttaaacgcagtaatgctcgcaacattaacatcttgaaccgttggtacaattccgttccataaatttataatgttcgccatttatataactcattttttgaatatacttttaattaacaaaagagttaagttactcatatggacgccgtccagtctgaacatcaatctttttagccagagatatcatagccgctcttagagtttcagcgtgattttccaacctaaatagaacttcatcgttgcgtttacaacacttttctatttgttcaaactttgttgttacattagtaatctttttttccaaattagttagccgttgtttgagagtttcctcattgtcgtcttcatcggctttaacaattgcttcgcgtttagcctctggctttttagcagcctttgtagaaaaaaattcagttgctggaattgcaagatcgtcatctccggggaaaagagttccgtccatttaaagtacagattttagaaactgacactctgcgttatttatatttggtacaacacatggattataaatattgatgttaataacatcagaaaatgtaaagtctatacattgttgcatcgtgttaaattttctaatggatctagtattattgggtccaacttctgcctgaaatccaaatatggaagcggatacaaaaccgtttcctggataaaccacacatctccacttttgctttacatcagaaattgtgtcgttgacatcttgaactctcctatctaatgccggtgttccacctatagattttgaatattcgaatgctgcatgagtagcattaaattccttaatattgccataattttcatatattgagtaaccctggataaaaagtaaacacaccgcagccgtcgctaccacaataaaaaaaattgatagagagttcatttataatctattagaagctgacaaaatttttttacacgcatcagacaatgctttaataaatagttcaacatctacttttgtcatatcgaaccgatggtatgattctaacctagaattacatccgaaaaagttgactatgttcatagtcattaagtcattaacaaacaacattccagactctggattataagacgatactgtttcgtcacaattacctaccttaatcatgtgattatgaatattggctattagagcaccttctaagaaatctataatatctttgaaacacgatttaaaatcaaaccacgaatatacttctacgaagaaagttagtttacccataggagaaataactataaatggagatctaaatacaaaatccggatctatgatagttttaacattattatattctctattaaatacctccacatctaaaaatgttaattttgaaactatgtcttcgtttattaccgtacctgaactaaacgctataagctctattgtttgagaactctttaaacgatattcttgaaatacatgtaacaaagtttcctttaactcggtcggtttatctaccatagttacagaatttgtatccttatctataatataataatcaaaatcgtataaagttatataattatcgcgttcagattgggatcttttcaaatagactaaaaaccccatttctctagtaagtatcttatgtatatgtttgtaaaatatcttcatggtgggaatatgctctaccgcagttagccattcctcattgacagcggtagatgtattagacaaaactattccaatgtttaacaagggccattttacgagattattaaatccttgtttgataaatgtagccaatgagggttcgagttcaacgacgattgaattctcttcccgcggatgctgcatgatgaacgacgggatgttgttcgattgatttggaattctttttcgactttttgtttatattaaatattttaaaatttatagcggatagcaattcatgtaccacggataatgtagacgcgtattgcgcatcgatatctttattattagataaatttatcaataaatgtgagaagtttgcctcgttaaggtcttccatttaaatattatataaacatttgtgtttgtaacttattcgtcttttatggaatagttttttactagtaaagctgcaattacacactttgtccgtaaaacataaatataaacaccagcttttatcaatcgttccaaaaagtcgacggcggacatttttaacatggcatctattttaaatacacttaggtttttggaaaaaacatcattttataattgtaacgattcaataactaaagaaaagattaagattaaacataagggaatgtcatttgtattttataagccaaagcattctaccgttgttaaatacttgtctggaggaggtatatatcatgatgatttggttgtattggggaaggtaacaattaataatctaaagatgatgctattttacatggatttatcatatcatggagtgacaagtagtggagcaatttacaaattgggatcgtctatcgatagactttctctaaataggactattgttacaaaagttaataattatgatgatacattttttgacgacgatgattgatcgctattgcacaattttgtttttgtactttctaatatagtgtttaggttctttttcatatgagaatattgatttactaaaatatctatgtttaacttttgttctatgacgtccttatcggcggtatcggtacatatacgtaattcaccttcacaaaatacggagtcttcgataataatagccaatcgattattggatctagctgtctgtatcatattcaacatgtttaatatatcctttcgtttcccctttacaggcatcgatcgtagcatattttccgcgtctgatatggaaatgttaaaactacaaaaatgcgtaatgttagcccgtcctaatattggtacgtgtctataagtttggcatagtagaataatagacgtgtttaaatgccttccaaagtttaagaattctattagagtattgcattttgatagtttatcgcctacatcatcaaaaataagtaaaaagtgtgctgattttttatgattttgtgcgacagcaatacatttttctatgttacttttagttcgtatcagattatattctagagattcctgactactaacgaaattaatatgatttggccaaatgtatccatcataatctgggttataaacgggtgtaaacaagaatatatgtttatattttttaactagtgtagaaaacagagatagtaaatagatagtttttccagatccagatcctcctgttaaaaccattctaaacggcatttttaataaattttctcttgaaaattgtttttcttggaaacaattcataattatatttacagttactaaattaatttgataataaatcaaaatatggaaaactaaggttgttagtagggaggagaacaaagaaggcacatcgtgatataaataacatttattatcatgatgacaccagaaaacgacgaagagcagacatctgtgttctccgctactgtttacggagacaaaattcagggaaagaataaacgcaaacgcgtgattggtctatgtattagaatatctatggttatttcactactatctatgattaccatgtccgcgtttctcatagtgcgcctaaatcaatgcatgtctgctaacgaggctgctattactgacgccgctgttgccgttgctgctgcatcatctactcatagaaaggttgcgtctagcactacacaatatgatcacaaagaaagctgtaatggtttatattaccagggttcttgttatatattacattcagactaccagttattctcggatgctaaagcaaattgcactgcggaatcatcaacactacccaataaatccgatgtcttgactacctggctcattgattatgttgaggatacatggggatctgatggtaatccaattacaaaaactacatccgattatcaagattctgatgtatcacaagaagttagaaagtatttttgtgttaaaacaatgaactaatatttatttttgtacattaataaatgaaatcgcttaatagacaaactgtaagtaggtttaagaagttgtcggtgccggccgctataatgatgatactctcaaccattattagtggcataggaacatttctgcattacaaagaagaactgatgcctagtgcttgcgccaatggatggatacaatacgataaacattgttatttagatactaacattaaaatgtctacagataatgcggtttatcagtgtcgtaaattacgagctagattgcctagacctgatactagacatctgagagtattgtttagtattttttataaagattattgggtaagtttaaaaaagaccaatgataaatggttagatattaataatgataaagatatagatattagtaaattaacaaattttaaacaactaaacagtacgacggatgctgaagcgtgttatatatacaagtctggaaaactggttaaaacagtatgtaaaagtactcaatctgtactatgtgttaaaaaattctacaagtgacaacaaaaaatgaattaataataagtcgttaacgtacgccgccatggacgccgcgtttgttattactccaatgggtgtgttgactataacagatacattgtatgatgatctcgatatctcaatcatggactttataggaccatacattataggtaacataaaaactgtccaaatagatgtacgggatataaaatattccgacatgcaaaaatgctactttagctataagggtaaaatagttcctcaggattctaatgatttggctagattcaacatttatagcatttgtgccgcatacagatcaaaaaataccatcatcatagcatgcgactatgatatcatgttagatatagaagataaacatcagccattttatctattcccatctattgatgtttttaacgctacaatcatagaagcgtataacctgtatacagctggagattatcatctaatcatcaatccttcagataatctgaaaatgaaattgtcgtttaattcttcattctgcatatcagacggcaatggatggatcataattgatgggaaatgcaatagtaattttttatcataaaagttgtaaagtaaataataaaacaataaatattgaactagtagtacgtatattgagcaatcagaaatgatgctggtacctcttatcacggtgaccgtagttgcgggaacaatattagtatgttatatattatatatttgtaggaaaaagatacgtactgtctataatgacaataaaattatcatgacaaaattaaaaaagataaagagttctaattccagcaaatctagtaaatcaactgatagcgaatcagactgggaggatcactgtagtgctatggaacaaaacaatgacgtagataatatttctaggaatgagatattggacgatgatagcttcgctggtagtttaatatgggataacgaatccaatgttatggcgcctagcacagaacacatttacgatagtgttgctggaagcacgctgctaataaataatgatcgtaatgaacagactatttatcagaacactacagtagtaattaatgaaacggagactgttgaagtacttaatgaagataccaaacagaatcctaactattcatccaatcctttcgtaaattataataaaaccagtatttgtagcaagtcaaatccgtttattacagaacttaacaataaatttagtgagaataatccgtttagacgagcacatagcgatgattatcttaataagcaagaacaagatcatgaacacgatgatatagaatcatcggtcgtatcattggtgtgattagtttcctttttataaaattgaagtaatatttagtattattgctgccgtcacgttgtacaaatggagatattccctgtattcggcatttctaaaattagcaattttattgctaataatgactgtagatattatatagatacagaacatcaaaaaattatatctgatgagatcaatagacagatggatgaaacggtacttcttaccaacatcttaagcgtagaagttgtaaatgacaatgagatgtaccatcttattcctcatagattatcgacgattatactctgtattagttctgtcggaggatgtgttatctctatagataatgacatcaatggcaaaaatattctaacctttcccattgatcatgctgtaatcatatccccactgagtaaatgtgtcgtagttagcaagggtcctacaaccatattggttgttaaagcggatatacctagcaaacgattggtaacatcgtttacaaacgacatactatatgtaaacaatctgtcactgattaattatttgccgttgtctgtattcattattagacgagtcaccgactatttggatagacacatatgcgatcagatatttgctaataataagtggtattcccttataaccatcgacgataagcaatatcctattccatcaaactgtataggtatgtcctctgccaagtacataaattctagcatcgagcaagatactttaatccatgtttgtaacctcgagcatccgttcgactcagtatacaaaaaaatgcagtcgtacaattctctacctatcaaggaacaaatattgtacggtagaattgataatataaatatgagcattagtatttctgtggattaatagatttctagtatggggatcattaatcatctctaatctctaaatacctcataaaacgaaaaaaaagctattatcaaatactgtacggaatggattcattctcttctctttttatgaaactctgttgtatatctactgataaaactggaagcaaaaaatctgatagaaagaataagaataagatcaaggattatatggaacacgattattataaaataacaatagttcctggttcctcttccacgtctactagctcgtggtattatacacatgcctagtaatagtctctttgcgttgacggaaagcagactagaaataacaggctaaaatgttcagacaccataatagttcccaacccagataataacagagttccatcaacacattcctttaaactcaatcccaaacccaaaaccgttaaaatgtatccggccaattgatagtagataatgaggtgtacagcgcatgataatttacacagtaaccaaaatgaaaatactttagtaattataagaaatatagacggtaatgtcatcatcaacaatccgataatatgcctgagagtaaacattgacggataaaacaaaaatgctccgcataactctatcatggcaataacacaaccaaatacttgtaagattcctaaattagtagaaaatacaacgaatatcgatgtataagtgatctcgagaaataataagaataaagtaatgcccgtaaagataaacatcaacattgtttggtaatcattaaaccaattagtatgaagttgaactaatttcacagtagattttattccagtgttatcctcgcatgtataagtacctggtaagatatctttatattccataatcaatgagacatcactatctgataacgaatgaagtctagcactagtatgccatttacttaatattgtcgtcttggaagttttattataagttaaaatatcatggttatccaatttccatctaatatactttgtcggattatctatagtacacggaataatgatggtatcattacatgctgtatactctatggtctttgtagttgttataacaaccaacgtatagaggtatatcaacgatattctaactcttgacattttttatttatttaaaatgatacctttgttatttattttattctattttgctaacggtattgaatggcataagtttgaaacgagtgaagaaataatttctacttacttattagacgacgtattatacacgggtgttaatggggcggtatacacattttcaaataataaactaaacaaaactggtttaactaataataattatataacaacatctataaaagtagaggatgcggataaggatacattagtatgcggaaccaataacggaaatcccaaatgttggaaaatagacggttcagacgacccaaaacatagaggtagaggatacgctccttatcaaaatagcaaagtaacgataatcagtcacaacggatgtgtactatctgacataaacatatcaaaagaaggaattaaacgatggagaagatttgacggaccatgtggttatgatttattcacggcggataacgtaattccaaaagatggtttacgaggagcattcgtcgataaagatggtacttatgacaaagtttacattcttttcactgatactatcggctcaaagagaattgtcaaaattccgtatatagcacaaatgtgcctaaacgacgaaggtggtccatcatcattgtctagtcatagatggtcgacgtttctcaaagtcgaattagaatgtgatatcgacggaagaagttatagacaaattattcattctagaactataaaaacagataatgatacgatactatatgtattcttcgatagtccttattccaagtccgcattatgtacctattctatgaataccattaaacaatctttttctacgtcaaaattggaaggatatacaaagcaattgccgtctccagctcctggtatatgtttaccagctggaaaagttgttccacataccacgtttgaagtcatagaacaatataatgtactagatgatattataaagcctttatctaaccaacctatcttcgaaggaccgtctggtgttaaatggttcgatataaaggagaaggaaaatgaacatcgggaatatagaatatacttcataaaagaaaattctatatattcgttcgatacaaaatctaaacaaactcgtagctcgcaagtcgatgcgcgactattttcagtaatggtaactgcgaaaccgttatttatagcagatatagggataggagtaggaatgccacaaatgaaaaaaatacttaaaatgtaatcttaatcgagtacaccacacgacaatgaacaaacataagacagattatgctggttatgcttgctgcgtaatatgcggtctaattgtcggaattatttttacagcgacactattaaaagttgtagaacgtaaattagttcatacaccattaatagataaaacgataaaagatgcatatattagagaagattgtcctactgactggataagctataataataaatgtatccatttatctactgatcgaaaaacctgggaggaaggacgtaatgcatgcaaagctctaaatccaaattcggatctaattaagatagagactccaaacgagttaagttttttaagaagccttagacgaggctattgggtaggagaatccgaaatattaaaccagacaaccccatataattttatagctaagaatgccacgaagaatggaactaaaaaacggaaatatatttgtagcacaacgaatactcccaaactgcattcgtgttacactatataacaattacactacatttttatcataccactacttcggttagatgttttagaaaaaaataaatatcgccgtaccgttcttgtttttataaaaataacaattaacaattatcaaattttttctttaatattttacgtggttgaccattcttggtggtaaaataatctcttagtgttggaatggaatgctgtttaatgtttccgcactcatcgtatattttgacgtatgcagtcacatcgtttacgcaatagtcagactgtagttctatcatgcttcctacatcagaaggaggaacagttttaaagtctcttggttttaatctattaccgttagttttcatgaaatcctttgttttatccacttcacattttaaataaatgtccactatacattcttttgttaattttactagatcgtcatgggtcatagaatttataggttccgtagtccatggatccaaactagcaaacttcgcgtatacggtatcgcgattagtgtatacaccaactgtatgaaaattaagaaaacagtttaataaatcaacagaaatatttaatcctccgtttgatacagatgcgccatatttatggatttcggattcacacgttgtttgtctgaggtgttcgtctagtgttgcttctacgtaaacttcgattcccatatattctttattgtcagaatcgcataccgatttatcatcatacactgtttgaaaactaaatggtatacacatcaaaataataaataataacgagtacattctgcaatattgttatcgtaattggaaaaatagtgttcgagtgagttggattatgtgagtattggattgtatattttattttatattttgtaataagaataaaatgctaatgtcaagtttattccaatagatgtcttattaaaaacatatataataaataacaatggctgaatggcataaaattatcgaggatatctcaaaaaataataagttcgaggatgccgccatcgttgattacaagactacaaagaatgttctagctgctattcctaacagaacatttgccaagattaatccgggtgaaattattcctctcatcactaatcgtaatattctaaaacctcttattggtcagaaatattgtattgtatatactaactctctaatggatgagaacacgtatgctatggagttgcttactgggtacgcccctgtatctccgatcgttatagcgagaactcataccgcacttatatttttgatgggtaagccaacaacatccagacgtgacgtgtatagaacgtgtagagatcacgctacccgtgtacgtgcaactggtaattaaaataaaaagtaatattcatatgtagtgtcaattttaaatgatgatgatgaaatggataatatccatattgacgatgtcaataatgccggtattggcatacagttcatcgatttttagatttcattcagaggatgtggaattatgttatgggcatttgtattttgataggatctataatgtagtaaatataaaatataatccgcatattccatatagatataattttattaatcacacgttaaccgtagatgaactagacgataatgtcttttttacacatggttattttttaaaacacaaatatggttcacttaatcctagtttgattgtctcattatcaggaaacttaaaatataatgatatacaatgctcagtaaatgtatcgtgtctcattaaaaatttggcaacgagtacatctactatattaacatctaaacataagacttattctctacatcggtccacgtgtattactataataggatacgattctattatatggtataaagatataaatgacaagtataatgacatctatgattttactgcaatatgtatgctaatagcgtctacattgatagtgaccatatacgtgtttaaaaaaataaaaatgaactcttaattatgctatgctattagaaatggataaaatcaaaattacggttgattcaaaaattggtaatgttgttaccatatcgtataacttggaaaagataactattgatgtcacacctaaaaagaaaaaagaaaaggatgtattattagcgcaatcagttgctgtcgaagaggcaaaagatgtcaaggtagaagaaaaaaatattatcgatattgaagatgacgatgatatggatgtagaaagcgcgtaatacgatctataaaaataagtatataaatactttttatttactgtactcttactgtgtagtggtgataccctactcgattatttttttaaaaaaaaaatacttattctgattcttctagccatttccgtgttcgtttgaatgccacatcgacgtcaaagataggggagtagttgaaatctagttctgcattgttggtacgcacctcaaatgtagtgttggatatcttcaacgtatagttgttgagtagtgatggttttctaaatagaattctcttcatatcattcttgcacgcgtacatttttagcatccatcttggaatcctagatccttgttctattcccaatggtttcatcaatagaagattaaacatatcgtacgaacacgatggagagtaatcgtagcaaaagtaagcatttcctttaatcttagatcccggatactggatatattttgcagccaacacgtgcatccatgcagcatttcctacatatacccggctatgcaccgcgtcatcatcgactgtacgatacataatgttaccgtgttgcttacattgctcgtaaaagactttcatcaatttgtctccttctccgtaaattccagtgggtcttaggcaacaagtatacaattttgctccattcatgattacggaattattggctttcataaccagttgctcggccatacgtttactttttgcgtatacatgtcctggtgatatatcataaagggtatgctcatggccgatgaatggatcaccgtgtttattgggtcctattgcttccatgctactagtatagatcaaatacttgattcctaggtccacacaagctgccaaaatagtctgtgttccataatagtttactttcatgatttcattatcggtgtattttccaaatacatccactagagcagccgtatgaataatcagatttaccccatctagcgcttctctcaccttatcaaagtcgtttatatcacattgtatatagtttataaccttaactttcgaggttattggttgtggatcttctacaatatctatgactctgatttcttgaacatcatctgcactaattaacagttttactatatacctgcctagaaatccggcaccaccagtaaccgcgtacacggccattgctgccactcataatatcagactacttattctattttactaaataatggctgtttgtataatagaccacgataatatcagaggagttatttactttgaaccagtccatggaaaagataaagttttaggatcagttattggattaaaatccggaacgtatagtttgataattcatcgttacggagatattagtcaaggatgtgattccataggcagtccagaaatatttatcggtaacatctttgtaaacagatatggtgtagcatatgtttatttagatacagatgtaaatatatttacaattattggaaaggcgttatctatttcaaaaaatgatcagagattagcgtgtggagttattggtatttcttacataaatgaaaagataatacattttcttacaattaacgagaatggcgtttgatatatcagttaatgcgtctaaaacaataaatgcattagtttacttttctactcagcaaaataaattagtcatacgtaatgaagttaatgatacacactacactgtcgaatttgatagggacaaagtagttgacacgtttatttcatataatagacataatgacaccatagagataagaggggtgcttccagaggaaactaatattggttgcgcggttagtatgacttacttgtataataagtatagttttaaactgattttagcagaatatataagacacagaaatactatatccggcaatatttattcggcattgatgacactagatgatttggctattaaacagtatggagacattgatctattatttaatgagaaacttaaagtagactccgattcgggactatttgactttgtcaactttgtaaaggatatgatatgttgtgattctagaatagtagtagctctatctagtctagtatctaaacattgggaattgacaaataaaaaatataggtgtatggcattagccgaacatatatctgatagtattccaatatctgagctatctagactacgatacaatctatgtaagtatctacgcggacacactgagagcatagaggataaatttgattattttgaagacgatgattcgtctacatgttctgccgtaaccgacagggaaacggatgtataattttttttatagcgtgaaggatatgataaaaaatataattgttgtatttatcccattccaatcaccttatatgattctgtaacacaataaaggagtcttatagatgtatagaggtcagatactggtttgataaactgtttattccacataagtatgtttgactttatggttagacccgcatactttaacaaatcactgaaaattggagttaggtattgacctctcagaatcagttgccgttctggaacattaaatgtattttttatgatatactccaacgcatttatgtgggcatacaacaagtcattactaatggaatattccaagagttttagttgtctagtatttaacaagagaagagatttcaacagactgtttatgaactcgaatgccgcctcattgtcgcttatattgatgatgtcgaattctcccaatatcatcaccgatgagtagctcatcttgttatcgggatccaagttttctaaagatgtcattaaaccctcgatcatgaatggatttatcatcatcgtttttatgttggacatgagcttagtccgtttgtccacatctatagaagatgatttctgaattatttcatatatctctctctttaactccaggaacttgtcaggatggtctactttaatatgttctcgtctaagagatgaaaatctttggatggttgcacgcgacttttctctaaaggatgacgttgcccaagatcctctcttaaatgaatccatcttatccttggacaagatggacagtctattttccttagatggtttaatatttttgttacccatgatctataaaggtagacctaatcgtctcggatgaccatatatttattttcagttttattatacgcataaattgtaaaaaatatgttaggtttacaaaaatgtctcgtggggcattaatcgtttttgaaggattggacaaatctggaaaaacaacacaatgtatgaacatcatggaatctataccggcaaacacgataaaatatcttaactttcctcagagatccactgtcactggaaaaatgatagatgactatctaactcgtaaaaaaacctataatgatcatatagttaatctattattttgtgcaaatagatgggagtttgcatcttttatacaagaacaactagaacagggaattactttaatagttgatagatacgcattttctggagtagcgtatgccgccgctaaaggcgcgtcaatgactctcagtaagagttatgaatctggattgcctaaacccgacttagttatattcttggaatctggtagcaaagaaattaatagaaacgtcggtgaggaaatttatgaagatgttacattccaacaaaaggtattacaagaatataaaaaaatgattgaagaaggagatattcattggcaaattatttcttctgaattcgaggaagatgtaaagaaggagttgattaagaatatagttatagaggctatacacacggttactggaccagtggggcaactgtggatgtaatagtgaaattacattttttataaatagatgttagtacagtgttataaatggatgaagcatattactctggcaacttggaatcagtactcggatacgtgtccgatatgcataccgaactcgtatcaatatctcaattagttattgccaagatagaaactatagataatgatatattaaacaaggacattgtaaattttatcatgtgtagatcaaacttggataatccatttatctctttcctagatactgtatatactattatagatcaagagatctatcagaccgaattgattaattcattagacgacaatgaaattatcgattgtatagttaataagtttatgagcttttataaggataacctagaaaatatagtagatgctatcattactctaaaatatataatgaataatccagattttaaaactacgtatgcagaagtactcggttccagaatagccgatatagatattaaacaagtgatacgtaagaatatactacaattgtctaataatatccgcgaacgatatttgtgaaaatattaaaaaaaaatactttttttattaaatgacgtcgcttcgcgaatttagaaaattatgctgtgatatatatcacgcatcaggatataaagaaaaatctaaattaattagagactttataacagatagggatgataaatatttgatcattaagctattgcttcccggattagacgatagaatttataacatgaacgataaacaaattataaaattatatagtataatatttaaacaatctcaggaagatatgctacaagatttaggatacggatatataggagacactattaggactttcttcaaagagaacacagaaatccgtccacgagataaaagcattttaactttagaagaagtggatagttttttaactacgttatcatccgtaactaaagaatcgcatcaaataaaattattgactgatgtagcatccgtttgtacatgtaatgatttaaaatgtgtagtcatgcttattgataaagatctaaaaattaaagcgggtcctcggtacgtacttaacgctattagtcctaatgcctatgatgtgtttagaaaatctaataacttgaaagagataatagaaaatgcatctaaacaaaatctagactctatatctatttctgttatgactccaattaatcccatgttagcggaatcgtgtgattctgtcaataaggcgtttaaaaaatttccatcaggaatgtttgcggaagtcaaatacgatggtgaaagagtacaagttcataaaaataataacgagtttgccttctttagtagaaacatgaaaccagtactctctcataaagtggattatctcaaagaatacataccgaaagcatttaaaaaagctacgtctatcgtattggattctgaaattgttcttgtagacgaacataatgtaccgctcccgtttggaagtttaggaatacacaaaaagaaagaatataaaaactctaacatgtgtttgttcgtgtttgactgtttgtactttgatggattcgatatgacggacattccattgtacgaacgaagatcttttctcaaagatgttatggttgaaatacccaatagaatagtattctcagagttgacgaatattagtaacgagtctcagttaactgacgtattggatgatgcactaacgagaaaattagaaggattggtcttaaaagatattaatggagtatacgaaccgggaaagagaagatggttaaaaataaagcgagactatttgaacgagggttccatggcagattctgccgatttagtagtactaggtgcttactatggtaaaggagcaaagggtggtatcatggcagtctttctaatgggttgttacgacgataaatccggtaaatggaagacggttaccaagtgttcaggacacgatgataatacgttaagggagttgcaagaccaattaaagatggttaaaattaacaaggatcccaaaaaaattccagagtggttggtagttaataaaatctatattcccgattttgtagtagaggatccaaaacaatctcagatatgggaaatttcaggagcagagtttacatcttccaagtcccataccgcaaatggaatatccattagatttcctagatttactaggataagagaggataaaacgtggaaagaatctactcatctaaacgatttagtaaacttgactaaatcttaatagttacatacaaactgaaaattaaaataacactatttagttggtggtcgccatggatggtgttattgtatactgtctaaacgcgctagtaaaacatggcgaggaaataaatcatataaaaaatgatttcatgattaaaccatgttgtgaaagagtttgtgaaaaagtcaagaacgttcacatcggcggacaatctaaaaacaatacagtgattgcagatttgccatatctggataatgcggtatccgatgtatgcaattcactgtataaaaagaatgtatcaagaatatccagatttgataaagatagatgacgatgacaagactcctactggtgtatataattattttaaacctaaagatgccattcctgttattatatccataggaaaggatagagatgtttgtgaactattaatctcatctgataaagcgtgtgcgtgtatagagttaaattcatataaagtagccattcttcccatggatgtttccttttttaccaaaggaaatgcatcattgattattctcctgtttgatttctctatcgatgcggcacctctcttaagaagtgtaaccgataataatgttattatatctagacaccagcgtctacatgacgagcttccgagttccaattggttcaagttttacataagtataaagtccgactattgttctatattatatatggttgttgatggatctgtgatgcatgcgatagctgataatagaactcacgcaattattagcaaaaatatattagacaatactacgattaacgatgagtgtagatgctgttattttgaaccacagattaggattcttgatagagatgagatgctcaatggatcatcgtgtgatatgaacagacattgtattatgatgtaggcaaatttggatctagtatgttggggaaatatgaacctgacatgattaagattgctctttcggtggctggtaatttaataagaaatcgagactacattcccgggagacgaggctatagcctctagataatttttttaagcacgaaataaaaaacataattttaaaccaatctatttcatactattttgtgtgatcaccatggacataaagatagatattagtatttctggtgataaatttacggtgactactaggagggaaaatgaagaaagaaaaaaatatctacctctccaaaaagaaaaaactactgatgttatcaaacctgattatcttgagtacgatgacttgttagatagagatgagatgtttactattctagaggaatattttatgtacagaggtctattaggcctcagaataaaatatggacgactctttaacgaaattaaaaaattcgacaatgatgcggaagaacaattcggtactatagaagaactcaagcagaaacttagattaaattctgaagagggagcagataactttatagattatataaaggtacaaaaacaggatatcgtcaaacttactgtatacgattgcatatctatgataggattgtgtgcatgcgtggtagatgtttggagaaatgagaaactgttttctagatggaaatattgtttacgagcgattaaactgtttattaatgatcacatgcttgataagataaaatctatactgcagaatagactagtatatgtggaaatgtcatagaaagttaaaagttaatgagagcaaaaatatataaggttgtattccatatttgttattttttctgtaatagttaaaaaatacattcgatggtctatctatcagattattatgtgttataaggtactttttctcataataaactagagtatgagtaagatagtgtttttcaaaacatataaatctaaaattgatggatgagatatacagctattaatttcgaaaatatattttaatctgataactttaaacatggatttttgatggtggtttaacgttttaaaaaaagattttgttattgtagtatatgataatattaaaagatggatataaagaatttgctgactgcatgtactattttttacattactacattggctacggcagatatacctacttcgtcactgccacacgctccggtaaacggggcatgtgacgagggagaatatcttgataagaggcataatcaatgttgtaatcagtgtccacctggagaatttgccaaggtcagatgtaatggtaacgataacacaaaatgtgaacgctgcccacctcatacatataccgcaatccccaattactctaatggatgtcatcaatgtagaaaatgcccaacaggatcatttgataaggtaaagtgtaccggaacacagaacagtaaatgttcgtgtcttcctggttggtattgcgctactgattcttcacagactgaagattgtcgagattgtataccaaaaaggagatgtccatgcggatactttggtggaatagatgaacaaggaaatcctatttgtaaatcgtgttgtgttggtgaatattgcgactacctacgtaattatagacttgatccatttcctccatgcaaactatctaaatgtaattaattatgattttgatgataatgttaccatacattatatcgctacttggttagtgtattattcagtatgaagacctattaataattacttatcttttgacgatcttgttataattataatataaaaacttatggcatagtaacttataattgctgacgcgataaattcgtaataatctgttttgttcaaaggaatctacaggcataaaaataaaaatataatttataatatactcttacagcgcgccatcatgaataacagcagtaaattaattgctgttattaatggatttagaaatagtggacgattttgtgatattaatatagttattaatgatgaaaggataaacgctcacagactcatcctatctggagcctccgaatatttttccattctgttttccaataattttatcgattctaatgaatacgaagttaatctaagtcatttagattatcaaagtgttaacgatttgatcgattacatttatgggatacctttgagcctaactaacgataacgtgaaatatattctttcaaccgctgattttttacaaattggatctgctattacggagtgtgaaaattacatacttaaaaatctttgttctagaaactgtatcgatttctacatatacgctgataaatataataacaagaaaatagaatcagcgtcgtttaacacaatattacaaaatattttgagactcatcaacgatgaaaactttaaatacttaacagaggaatcaatgataaaaattttaagcgatgatatgttaaatataaaaaatgaggatttcgccccactaattctcattaaatggttagagagtactcaacaaccatgcaccgtcgagttacttaaatgcctcagaatatcattgctttccccacaagttataaaatcactttatagtcatcgactggttagttcaatctacgaatgtataacattcttaaacaatatagcattcttggatgaatcatttcctagataccatagcatcgagttgatatctatcggtataagtaattcgcatgataagatttccataaactgctacaatcataaaaaaaatacatgggaaatgatatcttcacgtagatataggtgtagtttcgcagtggccgtcctggataatattatttatatgatgggtggatatgatcagtccccgtatagaagttcaaaggttatagcgtacaatacatgtacaaattcttggatatatgatataccagagctaaaatatcctcgttctaattgtgggggactggctgatgacgaatacatttattgtataggcggcatacgcgatcaggattcatcgttgacatctagtattgatagatggaagccatcaaaaccatattggcagaagtatgctaaaatgcgcgaaccaaaatgtgatatgggggttgcgatgttaaacggattaatatatgttataggtggaatcgttaaaggtgacacgtgtaccgacgcactagagagtttatcagaagatggatggatgaagcatcaacgtcttccaataaaaatgtccaatatgtcgacgattgttcatgatggcaagatttatatatctggaggttacaacaatagtagtgtagttaatgtaatatcgaatctagtccttagctataattcgatatatgatgaatggaccaaattatcatcattaaacattcctagaattaatcccgctctatggtcagcgcataataaattatatgtaggaggaggaatatctgatgatgttcgaactaatacatctgagacatacgacaaagaaaaagattgttggacattggataatggtcacgtgttaccacgcaattatataatgtataaatgcgaaccgattaaacataaatatccattggaaaaaacacagtacacgaatgattttctaaagtatttggaaagttttataggtagttgatagaacaaaatacataattttgtaaaaataaatcactttttatactaatatgacacgattaccaatacttttgttactaatatcattagtatactctacaccttttcctcagacatctaaaaaaataggtgatgatgcaactctatcatgtaatcgaaataatacaaatgactacgttgttatgagtgcttggtataaggagcccaattccattattcttttagctgctaaaagcgacgtcttgtattttgataattataccaaggataaaatatcttacgactctccatacgatgatctagttacaactatcacaattaaatcattgactgctagagatgccggtacttatgtatgtgcattctttatgacatcgcctacaaatgacactgataaagtagattatgaagaatactccacagagttgattgtaaatacagatagtgaatcgactatagacataatactatctggatctacacattcaccggaaactagttctgagaaacctgattatatagataattctaattgctcgtcggtattcgaaatcgcgactccggaaccaattactgataatgtagaagatcatacagacaccgtcacatacactagtgatagcattaatacagtaagtgcatcatctggagaatccacaacagacgagactccggaaccaattactgataaagaagaagatcatacagtcacagacactgtctcatacactacagtaagtacatcatctggaattgtcactactaaatcaaccaccgatgatacgtacaatgataatgatacagtaccatcaactactgtaggcggtagtacaacctctattagcaattataaaaccaaggactttgtagaaatatttggtattaccgcattaattatattgtcggccgtggcaatattctgtattacgtattatatatgtaataaacgttcacgtaaatacaaaacagagaacaaagtctagatttttgacttacataaatgtctgggatagtaaaatctatcatattgagcggaccatctggtttaggaaagacagccatagccaaaagactatgggaatatatttggatttgtggtgtcccataccactagatttcctcgtcctatggaacgagaaggtgtcgattaccattacgttaacagagaggccatctggaagggaatagccgccggaaactttctagaacatactgagtttttaggaaatatttacggaacttctaaaactgctgtgaatacagcggctattaataatcgtatttgtgtgatggatctaaacatcgatggcgttagaagtcttaaaaatacgtacctaatgccttactcggtgtatataagacctacctctcttaaaatggttgagaccaagcttcgttgtagaaacactgaagcggatgatgagattcatcgtcgtgtgatgttggcaaaaactgacatggatgaggcaggtgaagccggtctattcgacactattattattgaagatgatgtgaatttagcatatagtaagttaattcagatactacaggaccgtattagaatgtattttaacactaattagagacttaagacttaaaacttgataattaataatataactcgtttttatatgtggctatttcaacgtctaatgtattagttaaatattaaaacttaccacgtaaaacttaaaatttaaaatggtatttcattgacagatagatcacacattatgaactttcaaggacttgtgttaactgacaattgcaaaaatcaatgggtcgttggaccattaataggaaaaggtggattcggtagtatttatactactaatgacaataattatgtagtaaaaatagagcccaaagctaacggatcattatttaccgaacaggcattttatactagagtacttaaaccatccgttatcgaagaatggaaaaaatctcacaatataaagcacgtaggtcttatcacgtgcaaggcatttggtctatacaaatccattaatgtggaatatcgattcttggtaattaatagattaggtgcagatctagatgcggtgatcagagccaataataatagattaccaaaaaggtcggtgatgttgatcggaatcgaaatcttaaataccatacaatttatgcacgagcaaggatattctcacggagatattaaagcgagtaatatagtcttggatcaaatagataagaataaattatatctagtggattacggattggtttctaaattcatgtctaacggcgaacatgttccatttataagaaatccaaataaaatggataacggtactctagaatttacacctatagattcgcataaaggatacgttgtatctagacgtggagatctagaaacacttggatattgtatgattagatggttgggaggtatcttgccatggactaagatatctgaaacaaagaattgtgcattagtaagtgccacaaaacagaaatatgttaacaatactgcgactttgttaatgaccagtttgcaatatgaacctagagaattgctgcaatatattaccatggtaaactctttgacatattttgaggaacccaattacgacaagtttcggcacatattaatgcagggtgtatattattaagtgtggtgtttggtcgataaaaattaaaaaataacttaatttattattgatctcgtgtgtacaaccgaaatcatggcgatgttttacgcacacgctctcggtgggtacgacgagaatcttcatgcctttcctggaatatcatcgactgttgccaatgatgtcagaaaatattctgttgtgttagtttataataacaagtatgacattgtaaaagacaaatatatgtggtgttacagtcaggtgaacaagagatatattggagcactgctgcctatgtttgagtgcaatgaatatctacaaattggagatccgatccatgatcaagaaggaaatcaaatctctatcatcacatatcgccacaaaaactactatgctctaagcggaatcgggtacgagagtctagacttgtgtttggaaggagtagggattcatcatcacgtacttgaaacaggaaacgctgtatatggaaaagttcaacatgattattctactatcaaagagaaggccaaagaaatgaatgcacttagtccaggacctatcatcgattaccacgtctggataggagattgtatctgtcaagttactgctgtggacgtacatggaaaggaaattatgagaatgagattcaaaaagggtgcggtgcttccgatcccaaatctggtaaaagttaaacttggggagaatgatacagaaaatctttcttctactatatcggcggcaccatcgaggtaaccacctctctggaagacagcgtgaataatgtactcatgaaacgtttggaaactatacgccatatgtggtctgttgtatatgatcattttgatattgtgaatggtaaagaatgctgttatgtgcatacgcattcatctaatcaaaatcctataccgagtactgtaaaaacaaatttgtacatgaagactatgggatcatgcattcaaatggattccatggaagctctagagtatcttagcgaactgaaggaatcaggtggatggagtcccagaccagaaatgcaggaatttgaatatccagatggagtggaagacactgaatcaattgagagattggtagaggagttcttcaatagatcagaacttcaggctggtgaatcagtcaaatttggtaattctattaattgttaaacatacatctgtttcagctaagcaactaagaacacgtatacggcagcagcttccttctatactctcatcttttaccaacacaaagggtggatatttgttcattggagttgataataatacacacaaagtatttggattcacggtgggttacgactacctcagactgatagagaatgatatagaaaagcatatcaaaagactttgtgttgtgtatttctgtgagaagaaagaggacatcaagtacgcgtgtcgattcatcaaggtatataaacctggggatgaggctacctcgacatacgtgtgcgctatcaaagtggaaagatgctgttgtgctgtgtttgcagattggccagaatcatggtatatggatactaatggtatcaagaagtattctccagatgaatgggtgtcacatataaaattttaattaatgtaactatagagaacaaataataaggttgtaatatcatatagacaataactaacaattaattagtaactgttatctcttttttaattaaccaactaactatatacctattaatacatcgtaattatagttcttaacatctattaatcattaattcgcttctttaattttttataaactaacattgttaattgaaaagggataacatgttacagaatataaattatatatggatttttttaaaaaggaaatacttgactggagtatatatttatctcttcattatatagcacgcgtgttttccaatttttccacatcccatataatacaggattataatctcgttcgaacatacgagaaagtggataaaacaatagttgattttttatctaggttgccaaatttattccatattttagaatatggggaaaatattctacatatttattctatggatgatgctaatacgaatattataattttttttctagatagagtattaaatattaataagaacgggtcatttatacacaatctcgggttatcatcatccattaatataaaagaatatgtatatcaattagttaataatgatcatccagataataggataagactaatgcttgaaaatggacgtagaacaagacattttttgtcctatatatcagatacagttaatatctatatatgtattttaataaatcatggattttatatagatgccgaagacagttacggttgtacattattacatagatgtatatatcactataagaaatcagaatcagaatcatacaatgaattaattaagatattgttaaataatggatccgatgtagataaaaaagatacgtacggaaacacaccttttatcctattatgtaaacacgatatcaacaacgtggaattgtttgagatatgtttagagaatgctaatatagactctgtagactttaatagatatacacctcttcattatgtctcatgtcgtaataaatatgattttgtaaagttattaatttctaaaggagcaaatgttaatgcgcgtaataaattcggaactactccattttattgtggaattatacacggtatctcgcttataaaactatatttggaatcagacacagagttagaaatagataatgaacatatagttcgtcatttaataatttttgatgctgttgaatctttagattatctattatccagaggagttattgatattaactatcgtactatatacaacgaaacatctatttacgacgctgtcagttataatgcgtataatacgttggtctatctattaaacaaaaatggtgattttgagacgattactactagtggatgtacatgtatttcggaagcagtcgcaaacaacaacaaaataataatggaagtactattgtctaaacgaccatctttgaaaattatgatacagtctatgatagcaattactaaacataaacagcataatgcagatttattgaaaatgtgtataaaatatactgcgtgtatgaccgattatgatactcttatagatgtacagtcgctacagcaatataaatggtatattttaagatgtttcgatgaaatagatatcatgaagagatgttatataaaaaataaaactgtattccaattagttttttgtatcaaagacattaatactttaatgagatacggtaaacatccttctttcgtgaaatgcactagtctcgacgtatacggaagtcgtgtacgtaatatcatagcatctattagatatcgtcagagattaattagtctattatccaagaagctggatcctggagataaatggtcgtgttttcctaacgaaataaaatataaaatattggaaaactttaacgataacgaactatccacatatctaaaaatcttataaacattattaaaatataaaatctaagtaggataaaatcacactacatcattgtttccttttagtgctcgacagtgtatactatttttaacgctcataaataaaaatgaaaacgatttccgttgttacgttgttatgcgtactacctgctgttgtttattcaacatgtactgtacccactatgaataacgctaaattaacgtctaccgaaacatcgtttaatgataaccagaaagttacgtttacatgtgatcagggatatcattctttggatccaaatgctgtctgtgaaacagataaatggaaatacgaaaatccatgcaaaaaaatgtgcacagtttctgattatgtctctgaactatataataaaccgctatacgaagtgaattccaccatgacactaagttgcaacggcgaaacaaaatattttcgttgcgaagaaaaaaatggaaatacttcttggaatgatactgttacgtgtcctaatgcggaatgtcaacctcttcaattagaacacggatcgtgtcaaccagttaaagaaaaatactcatttggggaatatatgactatcaactgtgatgttggatatgaggttattggtgcttcgtacataagttgtacagctaattcttggaatgttattccatcatgtcaacaaaaatgtgatatgccgtctctatctaacggattaatttccggatctacattttctatcggtggcgttatacatcttagttgtaaaagtggttttacactaacggggtctccatcatccacatgtatcgacggtaaatggaatcccatactcccaatatgtgtacgaactaacgaaaaatttgatccagtggatgatggtcccgacgatgagacagatttgagcaaactctcgaaagacgttgtacaatatgaacaagaaatagaatcgttagaagcaacttatcatataatcatagtggcgttgacaattatgggcgtcatatttttaatctccgttatagtattagtttgttcctgtgacaaaaataatgaccaatataagttccataaattgctaccgtaaatataaatccgttaaaataattaataatttaataacaaacaagtatcaaaagattaaagacttatagctagaatcaattgagatgtcttcttcagtggatgttgatatctacgatgccgttagagcatttttactcaggcactattataacaagagatttattgtgtatggaagaagtaacgccatattacataatatatacaggctatttacaagatgcgccgttataccgttcgatgatatagtacgtactatgccaaatgaatcacgtgttaaacaatgggtgatggatacacttaatggtataatgatgaatgaacgcgatgtttctgtaagcgttggcaccggaatactattcatggaaatgtttttcgattacaataaaaatagtatcaacaatcaactaatgtatgatataattaatagcgtatctataattctagctaatgagagatatagaagcgcttttaacgacgatggtatatacatccgtagaaatatgattaacaagttgtacggatacgcatctctaactactattggcacgatcgctggaggtgtttgttattatctgttgatgcatctagttagtttgtataaataattatttcaatatactagttaaaattttaagattttaaatgtataaaaaactaataacgtttttatttgtaataggtgcattagcatcctattcgaataatgagtacactccgtttaataaactgagtgtaaaactctatatagatggagtagataatatagaaaattcatatactgatgataataatgaattggtgttaaattttaaagagtacacaatttctattattacagagtcatgcgacgtcggatttgattccatagatatagatgttataaacgactataaaattattgatatgtataccattgactcgtctactattcaacgcagaggtcacacgtgtagaatatctaccaaattatcatgccattatgataagtacccttatattcacaaatatgatggtgatgagcgacaatattctattactgcagagggaaaatgctataaaggaataaaatatgaaataagtatgatcaacgatgatactctattgagaaaacatactcttaaaattggatctacttatatatttgatcgtcatggacatagtaatacatattattcaaaatatgatttttaaaaatttaaaatatattatcacttcagtgacagtagtcaaataacaaacaacaccatgagatatattataattctcgcagttttgttcattaatagtatacatgctaaaataactagttataagtttgaatccgtcaattttgattccaaaattgaatggactggggatggtctatacaatatatcccttaaaaattatggcatcaagacgtggcaaacaatgtatacaaatgtaccagaaggaacatacgacatatccgcatttccaaagaatgatttcgtatctttctgggttaaatttgaacaaggcgattataaagtggaagagtattgtacgggactatgcgtcgaagtaaaaattggaccaccgactgtaacattgactgaatacgacgaccatatcaatttgtacatcgagcatccgtatgctactagaggtagcaaaaagattcctatttacaaacgcggtgacatgtgtgatatctacttgttgtatacggctaacttcacattcggagattctaaagaaccagtaccatatgatatcgatgactacgattgcacgtctacaggttgcagcatagactttgtcacaacagaaaaagtgtgcgtgacagcacagggagccacagaagggtttctcgaaaaaattactccatggagttcgaaagtatgtctgacacctaaaaagagtgtatatacatgcgcaattagatccaaagaagatgttcccaatttcaaggacaaaatggccagagttatcaagagaaaatttaatacacagtctcaatcttatttaactaaatttctcggtagcacatcaaatgatgttaccacttttcttagcatgcttaacttgactaaatattcataactaatttttattaatgatacaaaaacgaaataaaactgcatattatacactggttaacgcccttataggctctaaccattttcaagatgaggtccctgattatagtccttctgttcccctctatcatctactccatgtctattagacgatgtgagaagactgaagaggaaacatggggattgaaaatagggttgtgtataattgccaaagatttctatcccgaaagaactgattgcagtgttcatctcccaactgcaagtgaaggattgataactgaaggcaatggattcagggatatacgaaacaccgataaattataaaaaaagcaatgtgtccgctgtttccgttaataatactattttcgtaactggcggattattcataaataactctaatagcacgatcgtggttaacaatatggaaaaacttgacatttataaagacaaacaatggtcgattatagaaatgcctatggctagggtatatcacggcattgactcgacatttggaatgttatattttgccggaggtctatccgttaccgaacaatatggtaatttagagaaaaacaacgagatatcttgttacaatcctagaacgaataagtggtttgatatttcatatactatttataagatatccatatcatcattgtgtaaactaaataacgtcttctatgtatttagtaaggacattggatatgtggaaaagtatgatggtgcatggaagttagtacatgatcgtctccccgctataaaggcattatcaacttctccttattgattgaaaatgaaaatataaatagtttttatgtatagcagtattaccctatagttttattgcttactactaacatggatacagatgttacaaatgtagaagatatcataaatgaaatagatagagagaaagaagaaatactaaaaaatgtagaaattgaaaataataaaaacattaacaagaatcatcccaatgaatatattagagaagcactcgttattaataccagtagtaatagtgattccattgataaagaagttatagaatgtatcagtcacgatgtaggaatatagatcatatctactaatttttataatcgatacaaaacataaaaaacaactcgttattacatagcaggcatggaatccttcaagtattgttttgataacgatggcaagaaatggattatcggaaatactttatattctggtaattcaatactatataaggtcagaaaaaatttcactagttcgttctacaattacgtaatgaagatagatcacaaatcacacaagccattgttgtctgaaatacgattctatatatctgtattggatcctttgactatcgacaactggacacgggaacgtggtataaagtatttggctattccagatctgtatggaattggagaaaccgatgattatatgttcttcgttataaagaattcgggaagagtattcgccccaaaggatactgaatcagtcttcgaagcatgcgtcactatgataaacacgttagagtttatacactctcaaggatttacccatggaaaaatagaaccgaggaatatactgattagaaataaacgtctttcactaattgactattctagaactaacaaactatacaagagtggaaactcacatatagattacaacgaggacatgataacttcaggaaatatcaattatatgtgtgtagacaatcatcttggagcaacagtttcaagacgaggagatttagaaatgttgggatattgcatgatagaatggttcggtggcaaacttccatggaaaaacgaaagtagtataaaagtaataaaacaaaaaaaagaatataaaaaatttatagctactttctttgaggactgttttcctgaaggaaatgaacctctggaattagttagatatatagaattagtatacacgttagattattctcaaactcctaattatgacagactacgtaaactgtttatacaagattgaaattatattcttttttttatagagtgtggtagtgttacggatatctaatattaatattagactatctctatcgcgctacacgaccaatatcgattactatggatatcttctatgaaaggagagaatgtatttatttctccagcgtcaatctcgtcagtattgacaatactgtattatggagctaatggatccactgctgaacagctatcaaaatatgtagaaacggaggagaacacggataaggttagcgctcagaatatctcattcaaatccatgaataaagtatatgggcgatattctgccgtgtttaaagattcctttttgagaaaaattggcgataagtttcaaactgttgacttcactgattgtcgcactatagatgcaatcaacaagtgtgtagatatctttactgaggggaaaatcaatccactattggatgaaccattgtctcctagcaattagtgccgtatactttaaagcaaaatggttgacgccattcgaaaaggaatttaccagtgattatcccttttacgtatctccgacggaaatggtagacgtaagtatgatgtctatgtacggcaaggcatttaatcacgcatctgtaaaagaatcattcggcaacttttcaatcatagaactgccatatgttggagatactagtatgatggtcattcttccagacaagattgatggattagaatccatagaacaaaatctaacagatacaaattttaagaaatggtgtgactttatggatgctatgtttatagatgttcacattcccaagtttaaggtaacaggctcgtataatctggtggatactctagtaaagtcaggactgacagaggtgttcggttcaactggagattatagcaatatgtgtaatttagatgtgagtgtcgacgctatgatccacaaaacgtatatagatgtcaatgaagagtatacagaagcagctgcagcaacttctgtactagtggcagactgtgcatcaacaattacaaatgagttctgtgcagatcatccgttcatctatgtgattaggcatgttgatggaaaaattcttttcgttggtagatattgctctccgacaactaattgttaaccattttttttaaaaaaaatagaaaaaacatgtggtattagtgcaggtcgttgttcttccaattgcaattggtaagatgacggccaactttagtacccacgtcttttcaccacagcactgtggatgtgacagactgaccagtattgatgacgtcaaacaatgtttgactgaatatatttattggtcgtcctatgcataccgcaacaggcaatgcgctggacaattgtattccacactcctctcttttagagatgatgcggaattagtgttcatcgacattcgcgagctggtaaaaaatatgccgtgggatgatgtcaaagattgtacagaaatcatccgttgttatataccggatgagcaaaaaaccatcagagagatttcggccatcatcggactttgtgcatatgctgctacttactggggaggtgaagaccatcccactagtaacagtctgaacgcattgtttgtgatgcttgagatgctaaattacgtggattataacatcatattccggcgtatgaattgatgagttgtacatcttgacattttctttcttctcttctccctttcttctcttctcccttcctccctcttctccctttcccagaaacaaacttttttacccactataaaataaaatgagtatactacctgttatatttctttctatatttttttattcttcattcgttcagacttttaacgcgcctgaatgtatcgacaaagggcaatattttgcatcattcatggagttagaaaacgagccagtaatcttaccatgtcctcaaataaatacgctatcatccggatataatatattagatattttatgggaaaaacgaggagcggataatgatagaattataccgatagataatggtagcaatatgctaattctgaacccgacacaatcagactctggtatttatatatgcattaccacgaacgaaacctactgtgacatgatgtcgttaaatttgacaatcgtgtctgtctcagaatcaaatatagattttatctcgtatccacaaatagtaaatgagagatctactggcgaaatggtatgtcccaatattaatgcatttattgctagtaacgtaaacgcagatattatatggagcggacatcgacgccttagaaataagagacttaaacaacggacacctggaattattaccatagaagatgttagaaaaaatgatgctggttattatacatgtgttttagaatatatatacggtggcaaaacatataacgtaaccagaattgtaaaattagaggtacgggataaaataataccttctactatgcaattaccagatggcattgtaacttcaataggtagtaatttgactattgcatcgttgagacctcccacaacggatgcagacgtcttttggataagtaatggtatgtattacgaagaagatgatggggacggaaacggtagaataagtgtagcaaataaaatctatatgaccgataagagacgtgttattacatcccggttaaacattaatcctgtcaaggaagaagatgctacaacgtttacgtgtatggcgtttactattcctagcatcagcaaaacagttactgttagtataacgtgaatgtatgttgttacatttccatgtcaattgagtttataagaatttttatacattatcttccaacaaacaattgacgaacgtattgctatgattaactcccacgatactatgcatattattaatcattaacttgcagactatacctagtgctattttgacatactcatgttcttgtgtaattgcggtatctatattattaaagtacgtaaatctagctatagttttattatttaattttagataatataccgtctccttatttttaaaaattgccacatcctttattaaatcatgaatgggaatttctatgtcatcgttagtatattgtgaacaacaagagcagatatctataggaaagggtggaatgcgatacattgatctatgtagttttaaaacacacgcgaactttgaagaatttatataaatcattccatcgatacatccttctatgttgagatgtatatatccaggaattcgtttattaatatcgggaaatgtataaactaaaacattgcccgaaagcggtgcctctatctgcgttatatccgttcttaacttacaaaatgtaaccaatacctttgcatgacttgttttgttcggcaacgttagtttaaacttgacgaatggattaattacaatagcatgatccgcgcatctattaagtttttttactttaacgcccttgtatgtttttacagagactttatctaaatttctagtgcttgtatgtgttataaatataacgggatatagaaccgaatcacctaccttagatacccaattacattttatcagatccagataataaacaaattttgtcgccctaactaattctatattgttatatattttacaattggttatgatatcatgtaataacttggagtctaacgcgcatcgtcgtacgtttatacaattgtgatttagtgtagtatatctacacatgtatttttccgcactatagtattctggactagtgataaaactatcgttatatctatcttcaatgaactcatcgagatattgctctctgtcatattcatacacctgcataaactttctagacatcttacaatccgtgttattttaggatcatatttacatatttacgggtatatcaaagatgttagattagttaatgggaatcgtctataataatgaatattaaacaattatatgaggacttttaccacaaagcatcataaaaatgagtcgtcgtctgatttatgttttaaatatcaaccgcaaatcaactcataaaatacaagagaatgaaatatatacatattttagtcattgcaatatagaccatacttctacagaacttgattttgtagttaaaaactatgatctaaacagacgacaacctgtaactgggtatactgcactacactgctatttgtataataattactttacaaacgatgtactgaagatattattaaatcatggagtggatgtaacgatgaaaaccagtagcggacgtatgcctgtttatatattgcttactagatgttgtaatatttcacatgatgtagtgatagatatgatagacaaagataaaaaccacttattacatagagactattccaacctattactagagtatataaaatctcgttacatgttattaaaggaagaggatatcgatgagaacatagtatccactttattagataagggaatcgatcctaactttaaacaagacggatatacagcgttacattattattatttgtgtctcgcacacgtttataaaccaggtgagtgtagaaaaccgataacgataaaaaaggccaagcgaattatttctttgtttatacaacatggagctaatctaaacgcgttagataattgtggtaatacaccattccatttgtatcttagtattgaaatgtgtaataatattcatatgactaaaatgctgttgacttttaatccgaatttcgaaatatgtaataatcatggattaacgcctatactatgttatataacttccgactacatacaacacgatattcttgttatgttaatacatcactatgaaacaaatgttggagaaatgccgatagatgagcgtcgtatgatcgtattcgagtttatcaaaacatattctacacgtccggcagattcgataacttatttgatgaataggtttaaaaatataaatatttatacccgctatgaaggaaagacattattacacgtagcatgtgaatataataatacacacgtaatagattatcttatacgtatcaacggagatataaatgcgttaaccgacaataacaaacacgctacacaactcattatagataacaaagaaaattccccatataccattaattgtttactgtatatacttagatatattgtagataagaatgtgataagatcgttggtggatcaacttccatctctacctatcttcgatataaaatcatttgagaaattcatatcctactgtatacttttagatgacacattttacgataggcacgttaagaatcgcgattctaaaacgtatcgatacgcattttcaaaatacatgtcgtttgataaatacgatggtataataactaaatgtcacgacgaaacaatgttactcaaactgtccactgttctagacactacactatatgcagttttaagatgtcataattcgagaaagttaagaagatacctcaacgagttaaaaaaatataataacgataagtcctttaaaatatattctaatattatgaatgagagataccttaatgtatattataaagatatgtacgtgtcaaaggtatatgataaactatttcctgttttcacagataaaaattgtctactaacattactaccttcagaaattatatacgaaatattatacatgctgacaattaacgatctttataatatatcgtatccacctaccaaagtatagttgtatttttctcatgcgatgtgtgtaaaaaaactgatattatataaatattttagtgccgtataataaagatgacgatgaaaatgatggtacatatatatttcgtatcattattgttattgctattccacagttacgccatagacatcgaaaatgaaatcacagaattcttcaataaaatgagagatactctaccagctaaagactctaaatggttgaatccagcatgtatgttcggaggcacaatgaatgatatagccgctctaggagagccattcagcgcaaagtgtcctcctattgaagacagtcttttatcgcacagatataaagactatgtggttaaatgggagaggctagaaaagaatagacggcgacaggtttctaataaacgtgttaaacatggtgatttatggatagccaactatacatctaaattcagtaaccgtaggtatttgtgcaccgtaactacaaagaatggtgactgtgttcagggtatagttagatctcatattaaaaaacctccttcatgcattccaaaaacatatgaactaggtactcatgataagtatggcatagacttatactgtggaattctttacgcaaaacattataataatataacttggtataaagataataaggaaattaatatcgacgacattaagtattcacaaacgggaaaggaattaattattcataatccagagttagaagatagcggaagatacgactgttacgttcattacgacgacgttagaatcaagaatgatatcgtagtatcaagatgtaaaatacttacggttataccgtcacaagaccacaggtttaaactaatactagatccgaaaatcaacgtaacgataggagaacctgccaatataacatgcactgctgtgtcaacgtcattattgatcgacgatgtactgattgaatgggaaaatccatccggatggcttataggattcgattttgatgtatactctgttttaactagtagaggcggtatcaccgaggcgaccttgtactttgaaaatgttactgaagaatatataggtaatacatataaatgtcgtggacacaactattattttgaaaaaacccttacaactacagtagtattggagtaaatacacaatgcatttttatatacattactgaattattattactgaattattattactgaattattattaattatatcgtatttgtgctatagaatggatgaagatacgcgactatctaggtatttgtatctcaccgatagagaacatataaatgtagactctattaaacagttgtgtaaaatatcagatcctaatgcatgttatagatgtggatgtacggctttacatgagtacttttataattatagatcagtcaacggaaaatacaagtatagatacaacggttactatcaatattattcatctagcgattatgaaaattataatgaatattattatgatagaactggtatgaacagtgagagtgataatatatcaatcaaaacagaatatgaattctatgatgaaacacaagatcaaagtacacaactagtaggttacgacattaaactcaaaaccaatgaggatgattttatggctatgatagatcagtgggtgtccatgattatatagatgaatcaattaataaagtagtatatggaagagagtctcacgtaagatggcgggatatatggcaagaacataatgatggcgtatacagtataggaaaggagtgcatagataatatatacgaagacaaccataccgtagacgaattctacaagatagacagcgtatcagatgtagatgacgcggaacacatatctcctataactaatgatgtatctacacaaacatgggaaaagaaatcagagttagatagatacatggaatcgtatcctcgtcatagatatagtaaacattctgtatttaagggattttctgataaagttagaaaaaatgatttagacatgaatgtggtaaaagaattactttctaacggtgcatctctaacaatcaaggatagcagtaataaggatccaattgctgtttattttagaagaacgataatgaatttagaaatgattgatattattaacaaacatacaactattgatgaacgaaagtatatagtacactcctatctaaaaaattatagaaatttcgattatccatttttcaggaagttagttttgactaataaacattgtctcaacaattattataatataagcgacagcaaatatggaacaccgctacatatattggcgtctaataaaaaattaataactcctaattacatgaagttattagtgtataacggaaatgatataaacgcacgaggtgaagatacacaaatgcgaaccaactcagaaatggttgttgtattattgggtgtataggtattattagctatgtaccaatttaccaaccctcttaatattgattgataatcacatcggttatccaatcaataactaaattgtagtgtatatatagaccatatatgtttctatttttttgacagttacgtatagtttcagtaagttttgattgttgtattcctgtatctctagataagttagtcatatagtcccttccggcgatacgttttttccaagcccgaaattgattagccaaatgtgtatttatttttgtgatattgatataatatttcggataatgcatactgttagtcttatatcatttggttcatctatgtattgtaatattgttacatgatctatagatgatgtattgattttggcaggatcgaattccatatccgcgactaaacagtgaaaaaaatgtaaatactttttaaattttaaattagtaaaacttttttttattttttatgattccaaaaatactgaatacaaagtcctaaattataaatatggagatcatactaccacaacttattattatgtatacaaggccggtgtaatagatagatatatataattctattacaccggcagacaattaccgaccggtatttgtcgttaccaacataccgtataatatgtaatatacaattccataacccattgacagttgttatacatcaaaattgcaattcttttgattacgatgttataagaatgtagttaattgatgtatgatgttaatgtgtcctctttcctcttataacatcgtaatcaaaaacttttttataatatatacctaataatgtgtcttaatagttctcgtgattcgtcaaacaatcattcttataaaatataataaagcaacgtaaaacacataaaaataagcgtaactaataagacaatggatatttacgacgataaaggtctacagactattaaactgtttaataatgaatttgattgtataaggaatgacatcagagaattatttaaacatgtaactgattccgatagtatacaacttccgatggaagacaattctgatattatagaaaatatcagaaaaatactatatagacgattaaaaaatgtagaatgtgttgacatcgataacacaataacttttatgaaatacgatccaaatgatgataataagcgtacgtgttctaattgggtacccttaactaataactatatggaatattgtctagtaatatatttggaaacaccgatatgtggaggcaaaataaaattataccaccctacaggaaatataaagtcggataaggatattatgtttgcaaagactctagactttaaatcaacgaaagtgttaactggacgtaaaacaattgccgttctagacatatccgtttcatataatagatcaatgactactattcactacaacgacgacgttgatatagatatacatactgataaaaatggaaaagagttatgttattgttatataacaatagatgatcattacttggttgatgtggaaactataggagttatagtcaatagatctggaaaatgtctgttagtaaataaccatctaggtataggtatcgttaaagataaacgtataagcgatagttttggagatgtatgtatggatacaatatttgacttttctgaagcacgagagttattttcattaactaatgatgataacaggaatatagcatgggacactgataaactagacgatgatacagatatatggactcccgtcacagaagatgattacaaatttctttctagactagtattgtatgcaaaatctcaatcggatactgtatttgactattatgttcttactggtgatacggaaccacccactgtattcattttcaaggtaactagattttactttaatatgccgaaataaaaaatttttgtataatatctagaggtagaggtattgtttagataaatacaaataacatagatacatcgcatacttagcatttttataaatatacataagacatacactttatacatttttgtaaaaatactcataaaaaaaatttataaaaattatggcacaaccatatcttgtataggtagtttagttcgtcgagtgaacctataaacagataatagacaacacataataatgcctactaatacaagcataataccgggagatgggatatatgacgttgtagtgtttgggttttctgaacgttgatagtctactaatactacatgctgacatctaatgcctgtataaccatgagagcatctacaatacataccgtcaatatctctagcgtggatacagtcaccgtgtaaacaatatccatctccctctggaccgcataatctgatagctggaatatctgttgtagcgtttgtaatttctggcaatgtcgtttcgatagcgttaccactatcggcgaatgatctgattatcatagcagcgaacaacaacatcagataatttatcaacatttttgatggattctgtgtttatgctgtttctcagtgtgtgtttatgacaagattgggaattttatattattaattcagtaatataaactaataatatattgttaattgtgtaaataatataaaaataacaatacaatattgaatgtgttgctgttaaaaatgtatgtgttaatataatagaataaaataaatgagtatgatcattttagataacgattgattttatcattaccgcttcattcttatattctttgcttacggaacctatatttagaaacatctactaacaattttttatgcttgcattattaatggtatgtaatatgattgattgtgtacgcaataccaatttgttaagtatgaatacggggtacaaacataaattgaaatttaacattatttatttatgatatatatcgttatcgttaggtctataccatggatatctttaaagaactaatcttaaaacaccctgatgaaaatgttttgatttctccagtttccattttatctactttatctattctaaatcatggagcagctggttctacagctgaacaactatcaaaatatatagagaatatgaatgagaatacacccgatgacaataatgatgacatggaggtagatattccgtattgtgcgacactagctaccgcaaataaaatatacggtagcgatagtatcgagttccacgcctccttcctacaaaaaataaaagacgattttcaaactgtaaactttaataatgctaaccaaacaaaggaactaatcaacgaatgggttaagacaatgacaaatggtaaaattaattccttattgactagtccgctatccattaatactcgtatgacagttgttagcgccgtccattttaaagcaatgtggaaatatccattttctaaacatcttacatatacagacaagttttatatttctaagaatatagttaccagcgttgatatgatggtgggtaccgagaataacttgcaatatgtacatattaatgaattattcggaggattctctattatcgatattccatacgagggaaactctagtatggtaattatactaccggacgacatagaaggtatatataacatagaaaaaaatataacagatgaaaaatttaaaaaatggtgtggtatgttatctactaaaagtatagacttgtatatgccaaagtttaaagtggaaatgacagaaccgtataatctggtaccgattttagaaaatttaggacttactaatatattcggatattatgcagattttagcaagatgtgtaatgaaactatcactgtagaaaaatttctacatacgacgtttatagatgttaatgaggagtatacagaagcatcggccgttacaggagtatttacgattaacttttcgatggtatatcgtacgaaggtctacataaaccatccattcatgtacatgattaaagacaccacaggacgtatactttttatagggaaatactgctatccgcaataaatataaacaaatagacttttataaagagtcttcaacgataagtatatcgacatactacttatgctgcgaaagattctgaacgagaacgactatctcaccctcttggatcatatccgcactgctaaatactaaatctccactacactttttatcatcttatgaggaatgattgccttcgtgaaataggaataattagcaccagaatagctatggattattgtggtagagagtgcactattctatgtcgtctactggatgaagatgtgacgtacaaaaaaataaaactagaaattgaaacgtgtcacaacttatcaaaacatatagatagacgaggaaacaatgcgctacattgttacgtctccaataaatgcgatacagacattaagattgttctctcgcggagtcgagagactttgtagaaacaacgaaggattaactccgctaggagtatacagtaagcatagatacgtcaaatctcagattgtgcatctactgatatccagctattcaaattcctctaacgaactcaagtcgaatataaatgatttcgatctgtattcggataatatcgacttacgtctgctaaaatacctaattgtggataaacggatacgtccgtccaagaatacgaattatgcaatcaatggtctcggattggtggatatatacgtaacgacgcctaatccgagaccagaagtattgctatggcttcttaaatcagaatgttacagcaccggttacgtatttcgtacctgtatgtacgacagtgatatgtgtaagaactctcttcattactatatatcgtctcatagagaatctcaatctctatccaaggatgtaattaaatgtttgatcgataacaatgtttccatccatggcagagacgaaggaggatctttacccatccaatactactggtctttctcaaccatagatatagagattgttaaattattattaataaaggatgtggacacgtgtagagtatacgacgtcagccctatattatctaaacaagcgatttagagtaaccccatataatgtagacatggaaatcgttaatcttcttattgagagacgtcatactcttgtcgacgtaatgcgtagtattacttcgtacgattccagagaatataaccactacatcatcgataacattctaaagagatttagacaacaggatgtacaagccatgttgataaactacttacattacggcgatatggtcgttcgatgcatgttagataacggacaacaactatcctctgcacgactactttgttaataataatctcgtcgatgtaaacgtcgtaaggtttatcgtggaaaatatggacacgcggctgtaaatcacgtatcgaacaatggccgtctatgtatgtacggtctgatattatcgagatttaataattgcgggtatcactgttatgaaaccatactgatagatgtatttgatatactaagcaagtacatggatgatatagatatgatcgataactctactatattacgcggtcgatgtcaataatatacaatttgcaaagcggttattggaatatggagcgagtgtcacgctcgataatcaatacggccatccagaaaagcagttaccaaagagaaaacaaaacgaagctagttgatttattactgagttaccatcccactctagagactatgattgacgcatttaatagagatatacgctatctatatcctgaaccattattcgcctgtatcagatacgccttaatcctagatgatgattttccttctaaagtaaagtatgatatcgccggtcgtcataaggaactaaagcgctatagagtagacattaatagaatgaagaatgtctacatatcaggcgtctccatgtttgatatattatttaaacgaagcaaacgccacaaattgagatacgcaaagaatccgacatcaaatggtacaaaaaagaactaacgtccatcattacagaaactgtaaagaacaatgagaggatcgactccatagtggacaacattaatacagacgataacttgatttcgaaattacccatggagatactttattactccattaaataatttatcatggagcgataatgtcctgtttcatttgtttccatgacatattacaaaatcgattccgtccaagatgataaaaacatttaccggcatcataaacacggagtttattttatatgtctcgcataaacattactaaaaaaatatattgttcggttttctttcacatctttaattatgaaaaagtaaatcattatgagatggacgagattgtacgcatcgttcgcgacagtatgtggtacatacctaacgtatttatggacgacggtaagaatgaaggtcacgtttctgtcaacaatgtctgtcatatgtattttacgttctttgatgtggatacatcgtctcatctgtttaagctagttattaaacactgcgatctgaataaacgaggtaactctccattacattgctatacgatgaatacacgatttaatccatctgtattaaagatattgttacaccacggcatgcgtaactttgatagcaaggatgaccactatcaatcgataacaagatctttgatatactaacggacaccattgatgactttagtaaatcatccgatctattgctgtgttatcttagatataaattcaatgggagcttaaactattacgttctgtacaaaggatccgaccctaattgcgccgacgaggatgaactcacttctcttcattactactgtaaacacatatccacgttctacgaaagcaattattacaagttaagtcacactaagatgcgagccgagaagcgattcatctacgcgataatagattatggagcaaacattaacgcggttacacacttaccttcaacagtataccaaacatagtcctcgtgtggtgtatgctcttttatctcgaggagccgatacgaggatacgtaataatcttgattgtacacccatcatggaacgattgtgcaacaggtcatattctcataatgttactcaattggcacgaacaaaaggaagaaggacaacatctactttatctattcataaaacataatcaaggatacactctcaatatactacggtatctattagataggttcgacattcagaaagacgaatactataataccgcctttcaaaattgtaacaacaatgttgcctcatacatcggatacgacatcaaccttccgactaaagacggtattcgacttggtgtttgaaaacagaaacatcatatacaaggcggatgttgtgaatgacatcatccaccacagactgaaagtatctctacctatgattaaatcgttgttctacaagatgtctctccctacgacgattactacgtaaaaaagatactagcctactgcctattaagggacgagtcattcgcggaactacatagtaaattctgtttaaacgaggactataaaagtgtatttatgaaaaatatatcattcgataagatagattccatcatcgtgacataagtcgccttaaagagattcgaatctccgacaccgacctgtatacggtatcacagctatcttaaagccatacattcagacagtcacatttcatttcccatgtacgacgatctcatagaacagtgccatctatcgatggagcgtaaaagtaaactcgtcgacaaagcactcaataaattagagtctaccatcggtcaatctagactatcgtatttgcctccggaaattatgcgcaatatcatctaaacagtatgttgtacggaaagaaccattacaaatattatccatgatagaaagaaaatatctatatgattggagaagtaggaaacaggaacaagacgacgattactacattattaaatcatgaagtccgtattatactcgtatatattgtttctctcatgtataataataaacggaagagatatagcaccgcatgcaccatccgatggaaagtgtaaagacaacgaatacaaacgccataatttgtgtccgggaacatacgcttccagattatgcgatagcaagactaacacacaatgtacgccgtgtggttcgggtaccttcacatctcgcaataatcatttacccgcttgtctaagttgtaacggaagacgcgatcgtgtaacacgactcacaatagaatctgtgaatgctctcccggatattattgtcttctcaaaggatcatccggatgcaaggcatgtgtttcccaaacaaaatgtagaataggatacggagtatccggagacgtcatctgttctccgtgtggtctcggaacatattctcacaccgtctcttccgcagataaatgcgaacccgtacccagtaatacctttaactatatcgatgtggaaattaacctgtatcccgtcaacgacacgtcgtgtactcggacgaccactaccggtctcagcgaatccatctcaacgtcggaactaactattactatgaatcataaagactgtaatcccgtctttcgtgatggatacttctccgttcttaataaggtagcgacttcaggtttctttacaggagaaaggtgtgcactctgaatttcgagattaaatgcaataacaaagattcttcctccaaacagttaacgaaagcaaagaatgatactatcatgccgcattcggagacagtaactctagtgggcgacatctatatactatatagtaataccaatactcaagactacgaaactgatacaatctcttatcatgtgggtaatgttctcgatgtcgatagccatatgcccggtagttgcgatatacataaactgatcactaattccaaacccacccactttttatagtaagtttttcacccataaataataaatacaataattaatttctcgtaaaagtagaaaatatattctaatttattgcacggtaaggaagtagaatcataaagaacagtactcaatcaatagcaattatgaaacaatatatcgtcctggcatgcatgtgcctggcggcagctgctatgcctgccagtcttcagcaatcatcctcatcctcctcctcgtgtacggaagaagaaaacaaacatcatatgggaatcgatgttattatcaaagtcacaaagcaagaccaaacaccgaccaatgataagatttgccaatccgtaacggaaattacagagtccgagtcagatccagatcccgaggtggaatcagaagatgattccacatcagtcgaggatgtagatcctcctaccacttattactccatcatcggtggaggtctgagaatgaactttggattcaccaaatgtcctcagattaaatccatctcagaatccgctgatggaaacacagtgaatgctagattgtccagcgtgtccccaggacaaggtaaggactctcccgcgatcactcatgaagaagctcttgctatgatcaaagactgtgaagtgtctatcgacatcagatgtagcgaagaagagaaagacagcgacatcaagacccatccagtactcgggtctaacatctctcataagaaagtgagttacgaagatatcatcggttcaacgatcgtcgatacaaaatgcgtcaagaatctagagtttagcgttcgtatcggagacatgtgcaaggaatcatctgaacttgaggtcaaggatggattcaagtatgtcgacggatcggcatctgaaggtgcaaccgatgatacttcactcatcgattcaacaaaactcaaagcgtgtgtctgaatcgataactctattcatctgaaattggatgagtagggttaatcgaacgattcagacacaccacgaattaaaaaagtgtaccggacactatattccggtttgcaaaacaaaaatgttcttaactacattcacaaaaagttacctctcgcgacttcttctttttctgtctcaatagtgtgatacgattatgacactattcctattcctattcctatttcctttcagagtatcacaaaaatattaaacctctttctgatggtctcataaaaaaagttttacaaaaatatttttattctctttctctctttgatggtctcataaaaaaagttttacaaaaatatttttattctctttctctctttgatggtctcataaaaaaagttttacaaaaatatttttattctctttctctctttgatggtctcataaaaaaagttttacaaaaatatttttattctctttctctctttgatggtctcataaaaaaagttttacaaaaatatttttattctctttctctctttgatggtctcataaaaaaagttttacaaaaatatttttattctctttctctctttgatggtctcataaaaaaagttttacaaaaatatttttattctctttctctctttgatggtctcataaaaaaagttttacaaaaatatttttattctctttctctctttgatggtctcataaaaaaagttttacaaaaatatttttattctctttctctctttgatggtctcataaaaaaagttttacaaaaatatttttattctctttctctctttgatggtctcataaaaaaagttttacaaaaatatttttattttctttctctctttgatggtctcataaaaaatattaaacctctttctgatggtgtcactaaaatatttttattctcattctcattttctctttctctcttcaatggagtcataaaatatttttattctctttctctcttcgatggtctcacaaaaatattaaacctctttctgatggtgtcactaaaatatttttattctcattctcattttctttttctctcttcaatggagtcataaaatatttttattctctttctctcttcgatggtctcacaaaaatattaaacctctttctgatggagtcgtaaaaaagttttatctctttctctcttcgatggtctcactaaaatattttttattctctttctgatgcatcaactatttcttaaacaataacgtccaacaacatatactcgtcgagcttatcaacatcccctatgcccatctaggttaccagacaattgtatatcataaaataatgtttataatttacacgttaaaatcatataataaaacgtagatcgtataatattttttggtatataaatgatctagtaaaatccatgtaggggatactgctcacattttttctttggtacaaaatttcacacaagtttttatacagacaaattcttgtccatatattttaaaacattgacttttgtactaagaaaaatatctagactaactatctc

SEQ ID NO: 5 - DNA, 187653 bp, Artificial Sequence
  LIVP 4.1.1
agaaagagaataaaaatatttttgtaaaactttttttatgagaccatcaaagagagaaagagaataaaaatatttttgtaaaactttttttatgagaccatcaaagagagaaagagaataaaaatatttttgtaaaactttttttatgagaccatcaaagagagaaagagaataaaaatatttttgtaaaactttttttatgagaccatcaaagagagaaagagaataaaaatatttttgtaaaactttttttatgagaccatcaaagagagaaagagaataaaaatatttttgtaaaactttttttatgagaccatcaaagagagaaagagaataaaaatatttttgtaaaactttttttatgagaccatcaaagagagaaagagaataaaaatatttttgtaaaactttttttatgagaccatcaaagagagaaagagaataaaaatatttttgtaaaactttttttatgagaccatcagaaagaggtttaatatttttgtgatactctgaaaggaaataggaataggaataggaatagtgtcataatcgtatcacactattgagacagaaaaagaagaagtcgcgagaggtaactttttgtgaatgtagttaagaacatttttgttttgcaaaccggaatatagtgtccggtacacttttttaattcgtggtgtgcctgaatcgttcgattaaccctactcatccaatttcagatgaatagagttatcgattcagacacacgctttgagttttgttgaatcgatgagtgaagtatcatcggttgcaccttcagatgccgatccgtcgacatacttgaatccatccttgacctcaagttcagatgattccttgcacatgtctccgatacgaacgctaaactctagattcttgacgcattttgtatcgacgatcgttgaaccgatgatatcttcgtaactcactttcttatgagagatgttagacccgagtactggatgggtcttgatgtcgctgtctttctcttcttcgctacatctgatgtcgatagacacttcacagtctttgatcatagcaagagcttcttcatgagtgatcgcgggagagtccttaccttgtcctggggacacgctggacaatctagcattcactgtgtttccatcagcggattctgagatggatttaatctgaggacatttggtgaatccaaagttcattctcagacctccaccgatgatggagtaataagtggtaggaggatctacatcctcgactgatgtggaatcatcttctgattccacctcgggatctggatctgactcggactctgtaatttccgttacggattggcaaatcttatcattggtcggtgtttggtcttgctttgtgactttgataataacatcgattcccatatgatgtttgttttcttcttccgtacacgaggaggaggatgaggatgattgctgaagactggcaggcatagcagctgccgccaggcacatgcatgccagtacgatatattgtttcataattgctattgattgagtactgttctttatgattctacttccttaccgtgcaataaattagaatatattttctacttttacgagaaattaattattgtatttattatttatgggtgaaaaacttactataaaaagtgggtgggtttggaattagtgatcagtttatgtatatcgcaactaccgggcatatggctatcgacatcgagaacattacccacatgataagagattgtatcagtttcgtagtcttgagtattggtattactatatagtatatagatgtcgcccactagagttactgtctccgaatgcggcatgatagtatcattctttgctttcgttaactgtttggaggaagaatctttgttattgcatttaatctcgaaattcagagtgcacacctttctcctgtaaagaaacctgaagtcgctaccttattaagaacggagaagtatccatcacgaaatacgggattacagtctttatgattcatagtaatagttagttccgacgttgagatggattcgctgagaccggtagtggtcgtccgagtacacgacgtgtcgttaactggatacaggttaatttccacatcgatatagttaaacgtatttctgggtacgggttcgcatttatctgcggaagagacggtgtgagaatatgttccgagaccacacggagaacagatgacgtctccggatactccgtatcctattccacattttgtttgggaaacacatgccttgcatccggatgatcctttgagaagacaataatatccgggagagcattcacagattctattgtgagtcgtgttacacgatcgcgtcttccgttacaacttagacaagcgggtaaatgattattgcgagatgtgaaggtacccgaaccacacggcgtacatcgtgtgttagtcttgctatcgcataatctggaagcgtatgttcccggacacagattatggcgtttgtattcgttgtctttacactttccatcggatggtgcatgcggtgctatatctcttccgtttattattatacatgagagaaacaatatatacgagtataatacggacttcataatttaataatgtagtaatcgttgtcttgttcctgtttcctacttctccaatcatggataatatttgtaatggttctttccgtacaacatactgtttagatgatattgcgcataatttccggaggcaaatacgatagtctagattggccatcgatggtagactctaatttattgagtgctttgtcgacgagtttcgatagatggcactgttctatgagatcgtcgtacatgggaaatgaaatgtgactgtctgaatgtatggctttaagatagctgtgataccgtatacaggtcggtgtcggagattcgaatctctttgaggcgacttatgtcacgatgatggaatctatcttatcgaatgatatatttttcataaatacacttttatagtcctcgtttaaacagaatttactatgtagttccgcgaatgactcgtcccttaataggcagtaggctagtatcttttttacgtagtaatcgtcgtagggagagacatcttgtagaacaacgatttaatcataggtagagatactttcagtctgtggtggatgatgtcattcacaacatccgccttgtatatgatgtttctgttttcaaacaccaagtcgaataccgtctttagtcggaaggttgatgtcgtatccgatgtatgaggcaacattgttgttacaattttgaaaggcggtattatagtattcgtctttctgaatgtcgaacctatctaatagataccgtagtatattgagagtgtatccttgattatgttttatgaatagataaagtagatgttgtccttcttccttttgttcgtgccaattgagtaacattatgagaatatgacctgttgcacaatcgttccatgatgggtgtacaatcaagattattacgtatcctcgtatcggctcctcgagataaaagagcatacaccacacgaggactatgtttggtatactgttgaaggtaagtgtgtaaccgcgttaatgtttgctccataatctattatcgcgtagatgaatcgcttctcggctcgcatcttagtgtgacttaacttgtaataattgctttcgtagaacgtggatatgtgtttacagtagtaatgaagagaagtgagttcatcctcgtcggcgcaattagggtcggatcctttgtacagaacgtaatagtttaagctcccattgaatttatatctaagataacacagcaatagatcggatgatttactaaagtcatcaatggtgtccgttagtatatcaaagatcttgttatcgattgatagtggtcatccttgctatcaaagttacgcatgccgtggtgtaacaatatctttaatacagatggattaaatcgtgtattcatcgtatagcaatgtaatggagagttacctcgtttattcagatcgcagtgtttaataactagcttaaacagatgagacgatgtatccacatcaaagaacgtaaaatacatatgacagacattgttgacagaaacgtgaccttcattcttaccgtcgtccataaatacgttaggtatgtaccacatactgtcgcgaacgatgcgtacaatctcgtccatctcataatgatttactttttcataattaaagatgtgaaagaaaaccgaacaatatatttttttagtaatgtttatgcgagacatataaaataaactccgtgtttatgatgccggtaaatgtttttatcatcttggacggaatcgattttgtaatatgtcatggaaacaaatgaaacaggacattatcgctccatgataaattatttaatggagtaataaagtatctccatgggtaatttcgaaatcaagttatcgtctgtattaatgttgtccactatggagtcgatcctctcattgttctttacagtttctgtaatgatggacgttagttcttttttgtaccatttgatgtcggattctttgcgtatctcaatctgtggcgtttgcttcgtttaaataatatatcaaacatggagacgcctgatatgtaggcattcttcattctattaatgtctactctatagcgctttagttccttatgacgaccggcgatatcatactttactttagaaggaaaatcatcatctaggattaaggcgtatctgatacatgccgataatggttcaggatatagatagcgtatatctctattaaatgcgtcaatcatagtctctagagtgggatggtaactcagtaataaatcaactatcctcgttttgttttctctttggtaactgcttttctggatggccgtattgattatcgagcgtgatgttgtgacactcgctccatattccaataaccgctttgcaaattgtatattattgacatcgaccgcgtaatatagtagagttatcgatcatatctatatcatccatgtacttgcttagtatatcaaatacatctatcagtatggtttcataacagtgatacccgcaattattaaatctcgataatatcagaccgtacatacatagacggccattgttcgatatgtgatttacagccgcgtgtccatattttccacgataaaccttacgacgtttacatcgacgagattattattaacaaagtagtcgtgtagaggatagttgttgtccgtcgtcttatccatggttgctccgttatctaacatgcattgaatgataggtatacttaccatatcgccgtaatgtaagtagtttatcaacatggcttgtacatcctgttgtctaaatctctttagaatgttatcgatgatgtagtggttatattctctggaatcgtacgaagtaatactacgcattacgtcgacaagagtatgacgtctctcaataagaagattaacgatttccatgtctacattatatggggttactctaaatcgcttgtttagataatacgcctctaatatagggctgacgtcgtatactctacacgtgtccacatcctttattaataataatttaacaatctctatatctatggttgagaaagaccagtagtattggatgggtaaagatcctccttcgtctctgccatggatggaaacattgttatcgatcaaacatttaattacatccttggatagagattgagattctctatgagacgatatatagtaatgaagagagttcttacacatatcactgtcgtacatacaggtacgaaatacgtaaccggtgctgtaacattctgatttaagaagccatagcaatacttctggtctcggattaggcgtcgttacgtatatatccaccaatccgagaccattgattgcataattcgtattcttggacggacgtatccgtttatccacaattaggtattttagcagacgtaagtcgatattatccgaatacagatcgaaatcatttatattcgacttgagttcgttagaggaatttgaatagctggatatcagtagatgcacaatctgagattttacgtatctatgcttactgtatactcctagcggagttaatccttcgttgtttctacaaagtctctcgactccgcgagagaacaatcttaatgtctgtatcgcatttattggagacgtaacaatgtagcgcattgtttcctcgtctatctatatgttttgataagttgtgacacgtttcaatttctagttttatttttttgtacgtcacatcttcatccagtagacgacatagaatagtgcactctaccacaataatccatagctattctggtgctaattattcctatttcacgaaggcaatcattcctcataagatgataaaaagtgtagtggagatttagtatttagcagtgcggatatgatccaagagggtgagatagtcgttctcgttcagaatctttcgcagcataagtagtatgtcgatatacttatcgttgaagactctttataaaagtctatttgtttatatttattgcggatagcagtatttccctataaaaagtatacgtcctgtggtgtctttaatcatgtacatgaatggatggtttatgtagaccttcgtacgatataccatcgaaaagttaatcgtaaatactcctgtaacggccgatgcttctgtatactcctcattaacatctataaacgtcgtatgtagaaatttttctacagtgatagtttcattacacatcttgctaaaatctgcataatatccgaatatattagtaagtcctaaattttctaaaatcggtaccagattatacggttctgtcatttccactttaaactttggcatatacaagtctatacttttagtagataacataccacaccattttttaaatttttcatctgttatatttttttctatgttatatataccttctatgtcgtccggtagtataattaccatactagagtttccctcgtatggaatatcgataatagagaatcctccgaataattcattaatatgtacatattgcaagttattctcggtacccaccatcatatcaacgctggtaactatattcttagaaatataaaacttgtctgtatatgtaagatgtttagaaaatggatatttccacattgctttaaaatggacggcgctaacaactgtcatacgagtattaatggatagcggactagtcaataaggaattaattttaccatttgtcattgtcttaacccattcgttgattagttcctttgtttggttagcattattaaagtttacagtttgaaaatcgtcttttattttttgtaggaaggaggcgtggaactcgatactatcgctaccgtatattttatttgcggtagctagtgtcgcacaatacggaatatctacctccatgtcatcattattgtcatcgggtgtattctcattcatattctctatatattttgatagttgttcagctgtagaaccagctgctccatgatttagaatagataaagtagataaaatggaaactggagaaatcaaaacattttcatcagggtgttttaagattagttctttaaagatatccatggtatagacctaacgataacgatatatatcataaataaataatgttaaatttcaatttatgtttgtaccccgtattcatacttaacaaattggtattgcgtacacaatcaatcatattacataccattaataatgcaagcataaaaaattgttagtagatgtttctaaatataggttccgtaagcaaagaatataagaatgaagcggtaatgataaaatcaatcgttatctaaaatgatcatactcatttattttattctattatattaacacatacatttttaacagcaacacattcaatattgtattgttatttttatattatttacacaattaacaatatattattagtttatattactgaattaataatataaaattcccaatcttgtcataaacacacactgagaaacagcataaacacagaatccatcaaaaatgttgataaattatctgatgttgttgttcgctgctatgataatcagatcattcgccgatagtggtaacgctatcgaaacgacattgccagaaattacaaacgctacaacagatattccagctatcagattatgcggtccagagggagatggatattgtttacacggtgactgtatccacgctagagatattgacggtatgtattgtagatgctctcatggttatacaggcattagatgtcagcatgtagtattagtagactatcaacgttcagaaaacccaaacactacaacgtcatatatcccatctcccggtattatgcttgtattagtaggcattattatgtgttgtctattatctgtttataggttcactcgacgaactaaactacctatacaagatatggttgtgccataatttttataaatttttttatgagtatttttacaaaaatgtataaagtgtatgtcttatgtatatttataaaaatgctaagtatgcgatgtatctatgttatttgtatttatctaaacaatacctctacctctagatattatacaaaaattttttatttcggcatattaaagtaaaatctagttaccttgaaaatgaatacagtgggtggttccgtatcaccagtaagaacataatagtcaaatacagtatccgattgagattttgcatacaatactagtctagaaagaaatttgtaatcatcttctgtgacgggagtccatatatctgtatcatcgtctagtttatcagtgtcccatgctatattcctgttatcatcattagttaatgaaaataactctcgtgcttcagaaaagtcaaatattgtatccatacatacatctccaaaactatcgcttatacgtttatctttaacgatacctatacctagatggttatttactaacagacattttccagatctattgactataactcctatagtttccacatcaaccaagtaatgatcatctattgttatataacaataacataactcttttccatttttatcagtatgtatatctatatcaacgtcgtcgttgtagtgaatagtagtcattgatctattatatgaaacggatatgtctagaacggcaattgttttacgtccagttaacactttcgttgatttaaagtctagagtctttgcaaacataatatccttatccgactttatatttcctgtagggtggtataattttattttgcctccacatatcggtgtttccaaatatattactagacaatattccatatagttattagttaagggtacccaattagaacacgtacgcttattatcatcatttggatcgtatttcataaaagttattgtgttatcgatgtcaacacattctacattttttaatcgtctatatagtatttttctgatattttctataatatcagaattgtcttccatcggaagttgtatactatcggaatcagttacatgtttaaataattctctgatgtcattccttatacaatcaaattcattattaaacagtttaatagtctgtagacctttatcgtcgtaaatatccattgtcttattagttacgcttatttttatgtgtttttacgttgctttattatattttataagaatgattgtttgacgaatcacgagaactattaagacacattattaggtatatattataaaaaagtttttgattacgatgttataagaggaaagaggacacattaacatcatacatcaattaactacattcttataacatcgtaatcaaaagaattgcaattttgatgtataacaactgtcaatgggttatggaattgtatattacatattatacggtatgttggtaacgacaaataccggtcggtaattgtctgccggtgtaatagaattatatatatctatctattacaccggccttgtatacataataataagttgtggtagtatgatctccatatttataatttaggactttgtattcagtatttttggaatcataaaaaataaaaaaaagttttactaatttaaaatttaaaaagtatttacatttttttcactgtttagtcgcggatatggaattcgatcctgccaaaatcaatacatcatctatagatcatgtaacaatattacaatacatagatgaaccaaatgatataagactaacagtatgcattatccgaaatattatatcaatatcacaaaaataaatacacatttggctaatcaatttcgggcttggaaaaaacgtatcgccggaagggactatatgactaacttatctagagatacaggaatacaacaatcaaaacttactgaaactatacgtaactgtcaaaaaaatagaaacatatatggtctatatatacactacaatttagttattaattggataaccgatgtgattatcaatcaatattaagagggttggtaaattggtacatagctaataatacctatacacccaataatacaacaaccatttctgagttggatatcatcaaaatactaaataaatacgaggacgtgtatagagtaagtaaagaaaaagaatgtggaatttgctatgaagttgtttactcaaaacgatagatactttggtttattggattcgtgtactcatatattttgcataacatgcatcaatatatggcatagaacacgaagagaaaccggtgcgtcggataattgtcctatatgccgtacccgttttagaaacataacaatgagcaagttctataagctagttaactaataaataaaaagtttaatttgttgacgacgtatgtcgttattttttctcgtataaaagattaatttgattctaatataatctttagtattggataaatatcaattcaaattaattccattagattatatcataaataaaaatagtagcacacaactacttcagccaaatattcttttttgaaacgccatctatcgtagtgaggacacaagtgaacctataattatcaaatttattagtatcggttacatgaaggactttacgtagagtgacgattccactatctgtggtacgaacggtttcatcttctttgatgccatcacccagatgttctataaacttggtatcctcgtccgatctcatatcctttgccaaccaatacatgtagctaaaattaggcataaatttcacacatcctgaacaatgaaattctccagaagatgttacaatgtctagatttggacatttggtttcaaccgcgttaacatatgagtgaacacacccatacatgaaagcgatgagaaataggattctcatcttgccaaaatatcactagaaaaaatttatttatcagttttaaaggtataaaaaatacttattgttgctcgaatattttgtatttgatggtatacggaagattagaaatgtaggtattatcatcaactgattctatggttttatgtattctatcatgtttcactattgcgttggaaataatatcatatgcttccacatatattttattttgttttaactcataatactcacgtaattctggattattggcatatctatgaataattttagctccatgatcagtaaatattaatgagaacatagtattaccacctaccattatttttttcatctcattcaattcttaattgcaaagatctatataatcattatagcgttgacttatggactctggaatcttagacgatgtacagtcatctataatcatggcatatttaatacattgttttatagcatagtcgttatctacgatgttagatatttctctcaatgaatcaatcacacaatctaatgtaggtttatgacataatagcattttcagcagttcaatgtttttagattcgttgatggcaatggctatacatgtatatccgttatttgatctaatgttgacatctgaaccggattctagcagtaaagatactagagattgtttattatatctaacagccttgtgaagaagtgtttctcctcgtttgtcaatcatgttaatgtctttaagataaggtaggcaaatgtttatagtactaagaattgggcaagcataagacatgtcacaaagacccttttttgtatgtataagtgtaaaaattataacatccatagttggatttacataggtgtccaatcgggatctctccatcatcgagataattgatggcatctcccttccttttttagtagatatttcatcgtgtaagaatcaatattaatatttctaaagtatccgtgtatagcctctttatttaccacagctccatattccactagagggatatcgccgaatgtcatatactcaattagtatatgttggaggacatccgagttcattgttttcaatatcaaagagatggtttccttatcatttctccatagtggtacaatactacacattattccgtgcggctttccattttccaaaaacaatttgaccaaatctaaatctacatctttattgtatctataatcactatttagataatcagccataattcctcgagtgcaacatgttagatcgtctatatatgaataagcagtgttatctattcctttcattaacaatttaacgatgtctatatctatatgagatgacttaatataatattgaagagctgtacaatagtttttatctataaaagacggcttgattccgtgattaattagacatttaacaacttccggacgcacatatgctctcgtatccgactctgaatacagatgagagatgatatacagatgcaatacggtaccgcaatttcgtagttgataatcatcatacgcgtatcagtactcgtcctcataaagaacactgcagccattttctatgaacaaatcaataattttagaaacaggatcattgtcattacataattttctataactgaacgatggttttcacatttaacactcaagtcaaatccatgttctaccaacacctttatcaagtcaacgtctacatttttggatttcatatagctgaatatattaaagttatttatgttgctaaatccagtggcttctagtagagccatcgctatatccttattaactttaacatgtctactatttgtgtattcttctaatggggtaagctgtctccaatttttgcgtaatggattagtgccactgtctagtagtagtttgacgacctcgacattattacaatgctcattaaaaaggtatgcgtgtaaagcattattcttgaattggttcctggtatcattaggatctctgtctttcaacatctgtttaagttcatcaagagccacctcctcattttccaaatagtcaaacattttgactgaatgagctactgtgaactctatacacccacacaactaatgtcattaaatatcatgtcaaaaacttgtacaattattaataaaaataatttagtgtttaaattttaccagttccagattttacacctccgttaatacctccattaaccccactggacgatcctcctccccacattccaccgccaccagatgtataagttttagatcctttattactaccatcatgtccatggataaagacactccacatgccgccactaccccctttagaagacatattaataagacttaaggacaagtttaacaataaaattaatcacgagtaccctactaccaacctacactattatatgattatagtttctatttttacagtaccttgactaaagtttctagtcacaagagcaatactaccaacctacactattatatgattatagtttctatttttataggaacgcgtacgagaaaatcaaatgtctaatttctaacggtagtgttgataaacgattgttatccgcggatacctcctctatcatgtcgtctattttcttactttgttctattaacttattagcattatatattatttgattataaaacttatattgcttattagcccaatctgtaaatatcggattattaacatatcgtttctttgtaggtttatttaacatgtacatcactgtaagcatgtccttaccatttattttaatttgacgcatatccgcaatttctttttcgcagtcggttataaattctatatatgatggatacatgctacatgtgtacttataatcgactaatatgaagtacttgatacatattttcagtaacgatttattattaccacctatgaataagtacctgtgatcgtctaggtaatcaactgttttcttaatacattcgatggttggtaatttactcagaataatttccaatatcttaatatataattctgctatttctgggatatatttatctgccagtataacacaaatagtaatacatgtaaacccatattttgttattatattaatgtctgcgccattatctattaaccattctactaggctgacactatgcgactcaatacaatgataaagtatactacatccatgtttatctattttgtttatatcatcaatatacggcttacaaagttttagtatcgataacacatccaactcacgcatagagaaggtagggaataatggcataatatttattaggttatcatcattgtcattatctacaactaagtttccattttttaaaatatactcgacaactttaggatctctattgccaaatttttgaaaatatttatttatatgcttaaatctatataatgtagctccttcatcaatcatacatttaataacattgatgtatactgtatgataagatacatattctaacaatagatcttgtatagaatctgtatatcttttaagaattgtggatattaggatattattacataaactattacacaattctaaaatataaaacgtatcacggtcgaataatagttgatcaactatataattatcgattttgtgatttttcttcctaaactgtttacgtaaatagttagatagaatattcattagttcatgaccactatagttactatcgaataacgcgtcaaatatttcccgtttaatatcgcatttgtcaagataataatagagtgtggtatgttcacgataagtataataacgcatctctttttcgtgtgaaattaaatagtttattacgtccaaagatgtagcataaccatcttgtgacctagtaataatataataatagagaactgttttacccattctatcatcataatcagtggtgtagtcgtaatcgtaatcgtctaattcatcatcccaattataatattcaccagcacgtctaatctgttctattttgatcttgtatccatactgtatgttgctacatgtaggtattcctttatccaataatagtttaaacacatctacattgggatttgatgttgtagcgtatttttctacaatattaataccatttttgatactatttatttctatacctttcgaaattagtaatttcaataagtctatattgatgttatcagaacatagatattcgaatatatcaaaatcattgatatttttatagtcgactgacgacaataacaaaatcacaacatcgtttttgatattattatttttcttggtaacgtatgcctttaatggagtttcaccatcatactcatataatggatttgcaccactttctatcaatgattgtgcactgctggcatcgatgttaaatgttttacaactatcatagagtatcttatcgttaaccatgattggttgttgatgctatcgcattttttggtttctttcatttcagttatgtatggatttagcacgtttgggaagcatgagctcatatgatttcagtactgtagtgtcagtactattagtttcaataagatcaatctctagatctatagaatcaaaacacgataggtcagaagataatgaatatctgtaggcttcttgttgtactgtaacttctggttttgttagatggttgcatcgtgctttaacgtcaatggtacaaattttatcctcgctttgtgtatcatattcgtccctactataaaattgtatattcagattatcatgcgatgtgtatacgctaacggtatcaataaacggagcacaccatttagtcataaccgtaatccaaaaatttttaaagtatatcttaacgaaagaagttgtgtcattgtctacggtgtatggtactagatcctcataagtgtatatatctagagtaatgtttaatttattaaatggttgataatatggatcctcgtgacaatttccgaagatggaaataagacataaacacgcaataaatctaattgcggacatggttactccttaaaaaaatacgaataatcaccttggctatttagtaagtgtcatttaacactatactcatattaatccatggactcataatctctatacgggattaacggatgttctatatacggggatgagtagttctcttctttaactttatactttttactaatcatatttagactgatgtatgggtaatagtgtttgaagagctcgttctcatcatcagaataaatcaatatctctgtttttttgttatacagatgtattacagcctcatatattacgtaatagaacgtgtcatctaccttattaactttcaccgcatagttgtttgcaaatacggttaatcctttgacctcgtcgatttccgaccaatctgggcgtataatgaatctaaactttaattgcttgtaatcattcgaaataatttttagtttgcatccgtagttatcccctttatgtaactgtaaatttctcaacgcgatatctccattaataatgatgtcgaattcgtgctgtatacccatactgaatggatgaacgaataccgacggcgttaatagtaatttactttttcatctttacatattgggtactagttttactatcataagtttataaattccacaagctactatggaataagccaaccatcttagtataccacacatgtcttaaagtttattaattaattacatgttgttttatatatatcgctacgaatttaaagagaaattagtttaggaagaaaaattatctatctacatcatcacgtctctgtattctacgatagagtgctactttaagatgcgacagatccgtgtcatcaaatatatactccattaaaatgattattccggcagcgaacttgatattggatatatcacaacctttgttaatatctacgacaatagacagcagtcccatggttccataaacagtgagtttatctttctttgaagagatattttgtagagatcttataaaactgtcgaatgacatcgcatttatatctttagctaaatcgtatatgttaccatcgtaatatctaaccgcgtctatcttaaacgtttccatcgctttaaagacgtttccgatagatggtctcatttcatcagtcatactgagccaacaaatataatcgtgtataacatctttgatagaatcagactctaaagaaaacgaatcggctttattatacgcattcatgataaacttaatgaaaaatgtttttcgttgtttaagttggatgaatagtatgtcttaataattgttattatttcattaattaatatttagtaacgagtacactctataaaaacgagaatgacataactaatcataactagttatcaaagtgtctaggacgcgtaattttcatatggtatagatcctgtaagcattgtctgtattctggagctattttctctatcgcattagtgagttcagaatatgttataaatttaaatcgaataacgaacataactttagtaaagtcgtctatattaactcttttattttctagccatcgtaataccatgtttaagatagtatattctctagttactacgatctcatcgttgtctagaatatcacatactgaatctacatccaattttagaaattggtctgtgttacatatctcttctatattattgttgatgtattgtcgtagaaaactattacgtagaccattttctttataaaacgaatatatagtactccaattatctttaccgatatatttgcacacataatccattctctcaatcactacatctttaagattttcgttgttaagatatttggctaaactatataattctattagatcatcaacagaatcagtatatatttttctagatccaaagacgaactctttggcgtcctctataatattcccagaaaagatattttcgtgttttagtttatcgagatctgatctgttcatatacgccatgattgtacggtacgttatgataaccgcataaaataaaaatccattttcatttttaaccaatactattcataattgagattgatgtaatactttgttactttgaacgtaaagacagtacacggatccgtatctccaacaagcacgtagtaatcaaatttggtgttgttaaacttcgcaatattcatcaatttagatagaaacttatactcatcatctgttttaggaatccatgtattattaccactttccaacttatcattatcccaggctatgtttcgtccatcatcgttgcgcagagtgaataattcttttgtattcggtagttcaaatatatgatccatgcatagatcggcaaagctattgtagatgtgatttttcctaaatctaatataaaactcgtttactagcaaacactttcctgatttatcgaccaagacacatatggtttctaaatctatcaagtggtggggatccatagttatgacgcagtaacatatattattacattcttgactgtcgctaatatctaaatatttattgttatcgtattggattctgcatatagatggcttgtatgtcaaagatatagaacacataaccaatttatagtcgcgctttacattctcgaatctaaagttaagagatttagaaaacattatatcctcggatgatgttatcactgtttctggagtaggatatattaaagtctttacagatttcgtccgattcaaataaatcactaaataatatcccacattatcatctgttagagtagtatcattaaatctattatattttatgaaagatatatcactgctcacctctatatttcgtacatttttaaactgtttgtataatatctctctgatacaatcagatatatctattgtgtcggtagacgataccgttacatttgaattaatggtgttccattttacaacgtttaacaagttgaccaattcatttttaatagtatcaaactctccatgattaaatattttaatagtatccattttatatcactacggacacaaagtagctgacataaaccattgtataatttttatgttttatgtttattagcgtacacattttggaagttccggcttccatgtatttcctggagagcaagtagatgatgaggaaccagataggttatatccgtacttgcacttaaagtttacattgtcgttgtatgagtatgatcttttaaacccgctagacaagtatccgtttgatattgtaggatgtggacatttaacaatctgacacgtgggtggatcggaccattctcctcctgaacacaggacactagagttaccaatcaacgaatatccactattgcaactataagttacaacgctcccatcggtataaaaatcctcgtatccgttatgtcttccgttggatatagatggaggggattggcatttaacagattcacaaataggtgcctcgggattccataccatagatccagtagatcctaattcacaatacgatttagattcaccgatcaactgatatccgctattacaagagtacgttatactagagccaaagtctactccaccaatatcaagttggccattatcgatatctcgaggcgatgggcatctccgtttaatacattgattaaagagtgtccatccagtacctgtacatttagcatatataggtcccattttttgctttctgtatccaggtagacatagatattctatagtgtctcctatgttgtaattagcattagcatcagtctccacactattcttaaatttcatattaatgggtcgtgacggaatagtacagcatgatagaacgcatcctattcccaacaatgtcaggaacgtcacgctctccaccttcatatttatttatccgtaaaaatgttatcctggacatcgtacaaataataaaaagcccatatatgttcgctattgtagaaattgtttttcacagttgctcaaaaacgatggcagtgacttatgagttacgttacactttggagtctcatctttagtaaacatatcataatattcgatattacgagttgacatatcgaacaaattccaagtatttgattttggataatattcgtattttgcatctgctataattaagatataatcaccgcaagaacacacgaacatctttcctacatggttaaagtacatgtacaattctatccatttgtcttccttaactatatatttgtatagataattacgagtctcgtgagtaattccagtaattacatagatgtcgccgtcgtactctacagcataaactatactatgatgtctaggcatgggagacttttttatccaacgatttttagtgaaacattccacatcgtttaatactacatatttctcatacgtggtataaactccacccattacatatatatcatcgtttacgaataccgacgcgcctgaatatctaggagtaattaagtttggaagtcttatccatttcgaagtgccgtgtttcaaatattctgccacacccgttgaaatagaaaattctaatcctcctattacatataactttccatcgttaacacaagtactaacttctgattttaacgacgacatattagtaaccgttttccattttttcgttttaagatctacccgcgatacggaataaacatgtctattgttaatcatgccgccaataatgtatagacaattatgtaaaacatttgcattatagaattgtctatctgtattaccgactatcgtccaatattctgttctaggagagtaatgggttattgtggatatataatcagagtttttaatgactactatattatgttttataccatttcgtgtcactggctttgtagatttggatatagttaatcccaacaatgatatagcattgcgcatagtattagtcataaacttgggatgtaaaatgttgatgatatctacatcgtttggatttttatgtatccactttaataatatcatagctgtaacatcctcatgatttacgttaacgtcttcgtgggataagatagttgtcagttcatcctttgataattttccaaattctggatcggatgtcaccgcagtaatattgttgattatttctgacatcgacgcattatatagttttttaattccatatcttttagaaaagttaaacatccttatacaatttgtgaaattaatattatgaatcatagtttttacacatagatctactacaggcggaacatcaattattatggcagcaactagtatcatttctacattgtttatggtgatgtttatcttcttccagcgcatatagtctaatagcgattcaaacgcgtgatagtttataccattcaatataatcgcttcatcctttagatggtgatcctgaatgcgtttaaaaaaattatacggagacgccgtaataatttccttattcacttgtataatttccccattgatagaaaatattacgctttccattcttaaagtactataagtaattatagtataatgtaaacgtttatatattcaatatttttataaaaatcattttgacattaattcctttttaaatttccgtctatcatctatagaaacgtattctatgaatttataaaatgcttttacgtgtcctatcgtaggcgatagaaccgctaaaaagcctatcgaatttctacaaaagaatctgttatatggtatagggagagtataaaacattaaatgtccgtacttattaaagtattcagtagccaatcctaactctttcgaatacttattaatggctcttgttctgtacgaatctatttttttgaacaacggacctagtggtatatcttgttctatgtatctaaaataatgtctgactagatccgttagtttaatatccgcagtcatcttgtctagaatggcaaatctaactgcgggtttaggctttagtttagtttctatatctacatctatgtctttatctaacaccaaaaatataatagctaatattttattacaatcatccggatattcttctacgatctcactaactaatgtttctttggttatactagtatagtcactatcggacaaataaagaaaatcagatgatcgatgaataatacatttaaattcatcatctgtaagatttttgagatgtctcattagaatattattagggttagtactcattatcattcggcagctattacttattttattatttttcaccatatagatcaatcattagatcatcaaaatatgtttcaatcatcctaaagagtatggtaaatgactcttcccatctaatttctgaacgttcaccaatgtctctagccactttggcactaatagcgatcattcgcttagcgtcttctatattattaactggttgattcaatctatctagcaatggaccgtcggacagcgtcattctcatgttcttaatcaatgtacatacatcgccgtcatctaccaattcatccaacaacataagctttttaaaatcatcattataataggtttgatcgttgtcatttctccaaagaatatatctaataagtagagtcctcatgcttagttaacaactattttttatgttaaatcaattagtacaccgctatgtttaatacttattcatattttagtttttaggattgagaatcaatacaaaaattaatgcatcattaattttagaaatacttagtttccacgtagtcaatgaaacatttgaactcatcgtacaggacgttctcgtacaggacgtaactataaaccggtttatatttgttcaagatagatacaaatccgataactttttttacgaattctacgggatccactttaaaagtgtcataccgggttctttttatttttttaaacagatcaatggtgtgatgttgattaggtcttttacgaatttgatatagaatagcgtttacatatcctccataatggtcaatcgccatttgttcgtatgtcataaattctttaattatatgacactgtgtattatttagttcatccttgttcattgttaggaatctatccaaaatggcaattatactagaactataggtgcgttgtatacacatattgatgtgtctgtttatacaatcaatgctactaccttcgggtaaaattgtagcatcatataccatttctagtactttaggttcattattatccattgcagaggacgtcatgatcgaatcataaaaaaatatattatttttatgttattttgttaaaaataatcatcgaatacttcgtaagatactccttcatgaacataatcagttacaaaacgtttatatgaagtaaagtatctacgatttttacaaaagtccggatgcataagtacaaagtacgcgataaacggaataataatagatttatctagtctatctttttctatagctttcatagttagatacatggtctcagaagtaggattatgtaacatcagcttcgataaaatgactgggttatttagtcttacacattcgctcatacatgtatgaccgttaactacagagtctacactaaaatgattgaacaatagatagtctaccattgtttcgtattcagatagtacagcgtagtacatggcatcttcacaaattatatcattgtctaatagatatttgacgcatcttatggatcccacttcaacagccatcttaaaatcggtagaatcatattgctttcctttatcattaataatttctagaacatcatctctatcataaaagatacaaatattaactgtttgatccgtaataacattgctagtcgatagcaatttgttaataagatgcgctgggctcaatgtcttaataagaagtgtaagaggactatctccgaatttgttttgtttattaacatccgttgatggaagtaaaagatctataatgtctacattcttgactgttttagagcatacaatatggagaggtgtatttccatcatgatctggttttgagggactaattcctagtttcatcatccatgagattgtagaagcttttggattgtctgacataagatgtctatgaatatgatttttgccaaatttatccactatcctggcttcgaatccgatggacattatttttttaaacactctttctgaaggatctgtacacgccaacaacggaccacatccttcttcatcaaccgagttgttaatcttggctccatactgtaccaataaatttattctctctatgacttcatcatctgttcccgagagataatatagaggcgttttatgctgtttatcacacgcgtttggatctgcgccgtgcgtcagcagcatcgcgactattctattattattaattttagaagctatatgcaatggataatttccatcatcatccgtctcatttggagagtatcctctatgaagaagttcttcgacaaatcgttcatctagtcctttaattccacaatacgcatgtagaatgtgataattatttccagaaggttcgatagcttgtagcatattcctaaatacatctaaatttttactattatatttggcataaagagatagataatactcggccgacataatgttgtccattgtagtataaaaattaatatttctatttctgtatatttgcaacaatttactctctataacaaatatcataacttagttcttttatgtcaagaaggcactggtttagttcatctataaatgtcacgccataactaccacgcatgccatactcagaattatgataaagatatttatccttggggtgtaggtaatggggattaatctttgttggatcagtctctaagttaacacatgtcacacatgatccatttatagttatatcacacgatgatgatttatgaattgattccggaagatcgctatcgtattttgtggttccacaattcatttccatacatgttattgtcacactaatattatgatgaactttatctagccgctgagtggtaaacaacagaacagatagtttattatctttaccaacaccctcagccgctgccacaaatctctgatccgtatccatgatggtcatgtttatttctagtccgtatccagtcaacactatgttagcatttctgtcgatatagctttcactcatatgacactcaccaataatagtagaattaatgtcgtaatttacaccaatagtgagttcggcggcaaagtaccaataccggtaatcttgtcgaggaggacatatagtattcttgtattctaccgaatacccgagagatgcgatacaaaagagcaagactaatttgtaaaccatcttactcaaaatatgtaacaatagtacgatgcaatgagtaagacaataggaaatctatcttatatacacataattattctatcaattttaccaattagttagtgtaatgttaacaaaaatgtgggagaatctaattagtttttctttacacaattgacgtacatgagtctgagttccttgtttttgctaattatttcatccaatttattattcttgacgatatcgagatcttttgtataggagtcaaacttgtattcaacatgcttttctataatcattttagctatttcggcatcatccaatagtacattttccagattagcagaatagatattaatgtcgtatttgaacagagcctgtaacatctcaatgtctttattatctatagccaatttaatgtccggaatgaagagaagggaattattggtgtttgtcgacgtcatatagtcgagcaagagaatcatcatatccacgtgtccattttttatagtgatgtgaatacaactaaggagaatagccagatcaaaagtagatggtatctctgaaagaaagtaggaaacaatacttacatcattaagcatgacggcatgataaaatgaagttttccatccagttttcccatagaacatcagtctccaatttttcttaacaaacagttttaccgtttgcatgttaccactatcaaccgcataatacaatgcggtgtttcccttgtcatcaaattgtgaatcatccagtccactgaatagcaaaatctttactattttggtatcttccaatgtggctgcctgatgtaatggaaattcattctctagaagatttttcaatgctccagcgttcaacaacgtacatactagacgcacgttattatcagctattgcataatacaaggcactatgtccatggacatccgccttaaatgtatctttactagagagaaagcttttcagctgcttagacttccaagtattaattcgtgacagatccatgtctgaaacgagacgctaattagtgtatattttttcattttttataattttgtcatattgcaccagaattaataatatctctaatagatctgattagtagatacatggctatcgcaaaacaacatatacacatttaataaaaataatatttattaagaaaattcagatttcacgtacccatcaatataaataaaataatgattccttacaccgtacccatattaaggagattccaccttacccataaacaatataaatccagtaatatcatgtctgatgatgaacacaaatggtgtattaaattccagtttttcaggagatgatctcgccgtagctaccataatagtagatgcctctgctacagttccttgttcgtcgacatctatctttgcattctgaaacattttataaatatataatgggtccctagtcatatgtttaaacgacgcattatctggattaaacatactaggagccatcatttcggctatcgacttaatatccctcttattttcgatagaaaatttagggagtttaagattgtacactttattccctaattgagacgaccaatagtctaattttgcagccgtgatagaatctgtgaaatgggtcatattatcacctattgccaggtacatactaatattagcatccttatacggaaggcgtaccatgtcatattctttgtcatcgattgtgattgtatttccttgcaatttagtaactacgttcatcatgggaaccgttttcgtaccgtacttattagtaaaactagcattgcgtgttttagtgatatcaaacggatattgccatatacctttaaaatatatagtattaatgattgcccatagagtattattgtcgagcatattagaatctactacattagacataccggatctacgttctactatagaattaattttattaaccgcatctcgtctaaagtttaatctatataggccgaatctatgatattgttgataatacgacggtttaatacacacagtattatctacgaaactttgataagttagatcagtgtacgtatatttagatgttttcagcttagctaatcctgatattaattctgtaaatgctggacccagatctctttttctcaaatccatagtcttcaataattctattctagtattacctgatgcaggcaatagcgacataaacatagaaaacgaatagccaaacggcgagaagacaatattatcatcttgaatatttttatacgctactataccggcattggtaaatccttgtagacgataggcggacgctgaacacgctaacgatagtatcaataacgcaatcatgattttatggtattaataattaaccttatttttatgttcggtataaaaattattgatgtctacacatccttttgtaattgacatctatatatccttttgtataatcaactctaatcactttaacttttacagttttccctaccagtttatccctatattcaacatatctatccatatgcatcttaacactctctgccaagatagcttcagagtgaggatagtcaaaaagataaatatatagagcataatcattctcgtatactctgccctttattacatcacccgcattgggcaacgaataacaaaatgcaagcatcttgttaacgggctcgtaaattgggataaaaattatgtttttattgattttatatctattttattcaagagaatattcaggaatttctttttccggttgtatctcgtcgcagtatatatcatttgtacattgtttcatattttttaatagtttacaccttttagtaggactagtatcgtacaattcatagctgtattttgaattccaatcacgcataaaaatatcttccaattgttgacgaagacctaatccatcatccggtgtaatattaatagatgctccacatgtatccgtaaagtaatttcctgtccaatttgaggtacctatataggccgttttatcggttaccatatatttggcatggtttaccctagaatacggaatgggaggatcagcatctggtacaataaatagctttacttctatatttatgtttttagattttagcatagcgatagatcttaaaaagtttctcatgataaacgaagatcgttgccagcaactaatcaatagcttaacggatacttgtctgtctatagcggatcttcttaattcatcttctatataaggccaaaacaaaattttacccgccttcgaataaataatagggataaagttcataacagatacataaacgaatttactcgcatttctaatacatgacaataaagcggttaaatcattggttctttccatagtacatagttgttgcggtgcagaagcaataaatacagagtgtggaacgccgcttacgttaatactaagaggatgatctgtattataatacgacggataaaagtttttccaattatatggtagattgttaactccaagataccagtatacctcaaaaatttgagtgagatccgctgccaagttcctattattgaagatcgcaatacccaattccttgacctgagttagtgatctccaatccatgttagcgcttcctaaataaatatgtgtattatcagatatccaaaattttgtatgaagaactcctcctaggatatttgtaatatctatgtatcgtacttcaactccggccatttgtagtctttcaacatcctttaatggtttgttagatttattaacggctactctaactcgtactcctcttttgggtaattgtacaatctcgtttaatattatcgtgccgaaattcgtacccacttcatccgataaactccaataaaaagatgatatatctagtgtttttgtggtattggatagaatttccctccacatgttaaatgtagacaaatatactttatcaaattgcatacctataggaatagtttctgtaatcactgcgattgtattatccggattcattttatttgttaaaagaataatcctatatcacttcactctattaaaaatccaagtttctatttctttcatgactgattttttaacttcatccgtttccttatgaagatgatgtttggcaccttcataaatttttatttctctattacaatttgcatgttgcatgaaataatatgcacctaaaacatcgctaatcttattgtttgttccctggagtatgagagtcgggggggtgttaatcttggaaattatttttctaaccttgttggtagccttcaagacctgactagcaaatccagccttaattttttcatgattgactaatgggtcgtattggtatttataaactttatccatatctctagatactgattctggacatagctttccgactggcgcatttggtgtgatggttcccataagtttggcagctagcagattcagtcttgaaacagcatctgcattaactagaggagacattagaatcattgctgtaaacaagtttggattatcgtaagaggctagctcccatggaatgacccaataagtagatttaatagttaccacgtgctgtaccaaagtcatcaatcatcattttttcaccattacttcttccatgtccaatatgatcatgtgagaatactaaaattcctaacgatgatatgttttcagctagttcgtcataacgtccagaatgtttaccagctccatgacttatgaatactaatgccttaggatatgtaataggtttccaatatttacaatatatgtaatcattgtccagattgaacatacagtttgcactcatgattcacgttatataactatcaatattaacagttcgtttgatgatcatattatttttatgttttattgataattgtaaaaacatacaattaaatcaatatagaggaaggagacggctactgtcttttgtgagatagtcatggcgactaaattagattatgaggatgctgttttttactttgtggatgatgataaaatatgtagtcgcgactccatcatcgatctaatagatgaatatattacgtggagaaatcatgttatagtgtttaacaaagatattaccagttgtggaagactgtacaaggaattgatgaagttcgatgatgtcgctatacggtactatggtattgataaaattaatgagattgtcgaagctatgagcgaaggagaccactacatcaattttacaaaagtccatgatcaggaaagtttattcgctaccataggaatatgtgctaaaatcactgaacattggggatacaaaaagatttcagaatctagattccaatcattgggaaacattacagatttgatgaccgacgataatataaacatcttgatactttttctagaaaaaaaattgaattgatgatataggggtcttcataacgcataattattacgttagcattctatatccgtgttaaaaaaaattatcctatcatgtatttgagagttttatatgtagcaaacatgatagctgtgatgccaataagctttagatattcacgcgtgctagtgttagggatggtattatctggtggtgaaatgtccgttatataatctacaaaacaatcatcgcatatagtatgcgatagtagagtaaacatttttatagtttttactggattcatacatcgtctacccaattcggttataaatgaaattgtcgccaatcttacacccaaccccttgttatccattagcatagtattaacttcgttatttatgtcataaactgtaaatgattttgtagatgccatatcatacatgatattcatgtccctattataatcattactaactttatcacaatatatgttgataatatctatatatgatctagtctttgtgggcaactgtctatacaagtcgtctaaacgttgtttactcatatagtatcgaacagccatcattacatggtcccgttccgttgatagataatcgagtatgttagtggacttgtcaaatctatataccatattttctggaagtggatatacatagtcgtgatcaacattattgctagcctcatcttctatatcctgtactataccattatctatatcatctacataatctatgatattattacacataaacatcgacaacatactattgtttattatctaagtcctgttgatccaaacccttgatctcctctatttgtactatctagagattgtacttcttccagttctggataatatatacgttgatagattagctgagctattctatctccagtatttacattaaacgtacattttccattattaataagaatgactcctatgtttcccctataatcttcgtctattacaccacctcctatatcaatgccttttagtgacagaccagacctaggagctattctaccatagcagaacttaggcatggacatactaatatctgtcttaattaactgtctttctcctggagggatagtataatcgtaagcgctatacaaatcatatccggcagcacccggcgattgcctagtaggagatttagctctgttagtttccttaacaaatctaactggtgagttaatattcatgttgaacataaaactaatattttatttcaaaattatttaccatcccatatattccatgaataagtgtgatgattgtacacttctatagtatctatatacgatccacgataaaatcctcctatcaatagcagtttattatccactatgatcaattctggattatccctcggataaataggatcatctatcagagtccatgtattgctggattcacaataaaattccgcatttctaccaaccaagaataaccttctaccgaacactaacgcgcatgatttataatgaggataataagtggatggtccaaactgccactgatcatgattgggtagcaaatattctgtagttgtatcagtttcagaatgtcctcccattacgtatataacattgtttatggatgccactgctggattacatctaggtttcagaagactcggcatattaacccaagcagcatccccgtggaaccaacgctcaacagatgtgggatttggtagacctcctactacgtataatttattgttagcgggtatcccgctagcatacagtctggggctattcatcggaggaattggaatccaattgtttgatatataatttaccgctatagcattgttatgtatttcattgttcatccatccaccgatgagatatactacttctccaacatgagtacttgtacacatatggaatatatctataatttgatccatgttcataggatactctatgaatggatacttgtatgatttgcgtggttgtttatcacaatgaaatattttggtacagtctagtatccattttacattatttatacctctgggagaaagataatttgacctgattacatttttgataaggagtagcagatttcctaatttatttcttcgctttatataccacttaatgacaaaatcaactacataatcctcatctggaacatttagttcatcgctttctagaataagtttcatagatagataatcaaaattgtctatgatgtcatcttccagttccaaaaagtgtttggcaataaagtttttagtatgacataagagattggatagtccgtattctatacccatcatgtaacactcgacacaatattcctttctaaaatctcgtaagataaagtttatacaagtgtagatgataaattctacagaggttaatatagaagcacgtaataaattgacgacgttatgactatctatatatacctttccagtatacgagtaaataactatagaagttaaactgtgaatgtcaaggtctagacaaaccctcgtaactggatctttatttttcgtgtatttttgacgtaaatgtgtgcgaaagtaaggagataactttttcaatatcgtagaattgactattatattgcctcctatggcatcaataattgttttgaatttcttagtcatagacaatgctaatatattcttacagtacacagtattgacaaatatcggcatttatgtttctttaaaagtcaacatctagagaaaaatgattatctttttgagacataactcccattttttggtattcacccacacgtttttcgaaaaaattagtttttccttccaatgatatattttccatgaaatcaaacggattggtaacattataaatttttttaaatcccaattcagaaatcaatctatccgcgacgaattctatatatgttttcatcatttcacaattcattcctataagtttaactggaagagccgcagtaagaaattcttgttcaatggataccgcatctgttataatagatctaacggtttcttcactcggtggatgcaataaatgtttaaacatcaaacatgcgaaatcgcagtgcagaccctcgtctctactaattagttcgttggaaaacgtgagtccgggcattaggccacgctttttaagccaaaatatggaagcgaatgatccggaaaagaagattccttctactgcagcaaaggcaataagtctctctccataaccggcgctgtcatgtatccacttttgagcccaatcggccttcttttttacacaaggcatcgtttctatggcattaaagagatagtttttttcattactatctttaacataagtatcgatcaaaagactatacatttccgaatgaatgttttcaatggccatctgaaatccgtagaaacatctagcctcggtaatctgtacttctgtacaaaatcgttccgccaaattttcattcactattccgtcactggctgcaaaaaacgccaatacatgttttataaaatatttttcgtctggtgttagtttattccaatcattgatatctttagatatatctacttcttccactgtccaaaatgatgcctctgcctttttatacatgttccagatgtcatgatattggattgggaaaataacaaatctatttggatttggtgcaaggatgggttccataactaaattaacaataacaataaattttttttcagttatctatatgcctgtacttggattttttgtacatcgatatcgccgcaatcactacaataattacaagtattattgatagcattgttattagtactatcataattaaattatctacattcatgggtgctgaataatcgttattatcatcattatcattttgtaattgtgacatcatactagataaatcgtttgcgagattgttgtgggaagcgggcatggaggatgcattatcattattatttaacgccttccatttggattcacaaatgttacgcacattcaacattttatggaaactataattttgtgaaaacaaataacaagaaaactcgtcatcgttcaaatttttaacgatagtaaaccgattaaacgtcgagctaatttctaacgctagcgactctgttggatatgggtttccagatatatatcttttcagttcccctacgtatctataatcatctgtaggaaatggaagatatttccatttatctactgttcctaatatcatatgtggtggtgtagtagaaccattaagcgcgaaagatgttatttcgcatcgtattttaacttcgcaataatttctggttagataacgcactctaccagtcaagtcaatgatattagcctttacagatatattcatagtagtcgtaacgatgactccatcttttagatgcgatactcctttgtatgtaccagaatcttcgtacctcaaactcgatatatttaaacaagttaatgagatattaacgcgttttatgaatgatgatatataaccagaagttttatcctcggtggctagcgctataaccttatcattataataccaactagtgtgattaatatgtgacacgtcagtgtgggtacaaatatgtacattatcgtctacgtcgtattcgatacatccgcatacagccaacaaatataaaatgacaaatactctaacgacgttcgtacccatcttgatgcggtttaataaatgttttgatttcaatttattgtaaaaaaagattcggttttatactgttcgatattctcattgcttatattttcatctatcatctccacacagtcaaatccgtggttagcatacacctcatcaaccggtaaaagactatcggactcttctatcattataactctagaatatttaatttggtcattattaatcaagtcaattatcttatttttaacaaacgtgagtattttactcattttttataaaaacttttagaaatatacagactctatcgtgtgtctatatcttctttttatatccaatgtatttatgtctgatttttcttcatttatcatatataatggtccaaattctacacgtgcttcggattcatccagatcattaaggttcttataattgtaacatccttctcttccctcttctacatcttccttcttattcttattcttagcgtcacagaatctaccacagcaggatcccatgacgagcgtcatattaaactaatccattttcaattataatatatgattagtaatgaccattaaaataaaaaatattcttcataaccggcaagaaagtgaaaagttcacattgaaactatgtcagtagtatacatcatgaaatgatgatatatatatactctattttggtggaggattatatgatataattcgtggataatcatttttaagacacatttctttattcgtaaatcttttcacgttaaatgagtgtccatattttgcaatttcttcatatgatggcggtgtacgtggacgaggctgctcctgttcttgttgtggtcgccgactgtcgtgtctgcgtttagatccctccattatcgcgattgcgtagatggagtactattttataccttgtaattaaatttttttattaattaaacgtataaaaacgttccgtatctgtatttaagagccagatttcgtctaatagaacaaatagctacagtaaaaataactagaataattgctacacccactagaaaccacggatcgtaatacggcaatcggttttcgataataggtggaacgtatattttatttaaggacttaacaattgtctgtaaaccacaatttgcttccgcggatcctgtattaactatctgtaaaagcatatgttgaccgggcggagccgaacattctccgatatctaatttctgtatatctataatattattaacctccgcatacgcattacagttcttttctagcttggataccgcactaggtacatcgtctagatctattcctatttcctcagcgatagctcttctatccttttccggaagcaatgaaatcacttcaataaatgattcaaccatgagtgtgaaactaagtcgagaattactcatgcatttgttagttattcggagcgcgcaatttttaaactgtcctataacctctcctatatgaatagcacaagtgacattagtagggatagaatgttgagctaatttttgtaaataactatctataaaaagattatacaaagttttaaactctttagtttccgccatttatccagtctgagaaaatgtctctcataataaatttttccaagaaactaattgggtgaagaatggaaacctttaatctatatttatcacagtctgttttggtacacatgatgaattcttccaatgccgtactaaattcgatatctttttcgatttctggatatgtttttaataaagtatgaacaaagaaatggaaatcgtaataccagttatgtttaactttgaaattgttttttattttcttgttaatgattccagccacttgggaaaagtcaaagtcgtttaatgccgatttaatacgttcattaaaaacaaactttttatcctttagatgaattattattggttcattggaatcaaaaagtaagatattatcgggtttaagatctgcgtgtaaaaagttgtcgcaacagggtagttcgtagattttaatgtataacagagccatctgtaaaaagataaactttatgtattgtaccaaagatttaaatcctaatttgatagctaactcggtatctactttatctgccgaatacagtgctaggggaaaaattataatgtttcctctttcatattcgtagttagttctcttttcatgttcgaaaaagtgaaacatgcggttaaaatagtttataacattaatattactgttaataactgccggataaaagtgggatagtaatttcacgaatttgatactgtcctttctctcgttaaacgcctttaaaaaaactttagaagaatatctcaatgagagttcctgaccatccatagtttgtatcaataatagcaacatatgaagaacacgtttatacagagtatgtaaaaatgttaatttatagtttaatcccatggcccacgcacacacgattaattttttttcatctccctttagattgttgtatagaaatttgggtactgtgaactccgccgtagtttccatgggactatataattttgtggcctcgaatacaaattttactacatagttatctatcttaaagactataccatatcctcctgtagatatgtgataaaaatcgtcgtttataggataaaatcgtttatccttttgttggaaaaaggatgaattaatgtaatcattctcttctatctttagtagtgtttccttattaaaattcttaaaataatttaacaatctaactgacggagcccaattttggtgtaaatctaattgggacattatattgttaaaatacaaacagtctcctaatataacagtatctgataatctatggggagacatccattgatattcaggggatgaatcattggcaacacccatttattgtacaaaaagccccaatttacaaacgaaagtccaggtttgatagagacaaacaattaactattttgtctctgtttttaacacctccacagtttttaatttctttagtaatgaaattattcacaatatcagtatcttctttatctaccagagattttactaacttgataaccttggctgtctcattcaatagggtagtaatatttgtatgtgtgatattgatatctttttgaattgtttcttttagaagtgattctttgatggtgccagcatacgaattacaataatgcagaaactcggttaacatgcaggaattatagtaagccaattccaattgttgcctgtgttgtattagagtgtcaatatgagcaatggtgtccttgcgtttctctgatagaatgcgagcagcgattttggcgttatcatttgacgatatttctggaatgacgaatcctgtttctactaactttttggtaggacaaagtgaaacaatcaagaagatagcttctcctcctatttgtggaagaaattgaactcctctagatgatctactgacgatagtatctccttgacagatattggaccgaattacagaagtacctggaatgtaaagccctgaaaccccctcattttttaagcagattgttgccgtaaatcctgcactatgcccaagatagagagctcctttggtgaatccatctctatgtttcagtttaaccaagaaacagtcagctggtctaaaatttccatctctatctaatacagcatctaacttgatgtcaggaactatgaccggtttaatgttatatgtaacattgagtaaatccttaagttcataatcatcactgtcatcagttatgtacgatccaaacaatgtttctaccggcatagtggatacgaagatgctatccatcagaatgtttccctgattagtattttctatatagctattcttctttaaacgattttccaaatcagtaactatgttcatttttttaggagtaggacgcctagccagtatggaagaggattttctagatcctctcttcaacatctttgatctcgatggaatgcaaaaccccatagtgaaacaaccaacgataaaaataatattgtttttcactttttataattttaccatctgactcatggattcattaatatctttataagagctactaacgtataattctttataactgaactgagatatatacaccggatctatggtttccataattgagtaaatgaatgctcggcaataactaatggcaaatgtatagaacaacgaaattatactagagttgttaaagttaatattttctatgagctgttccaataaattatttgttgtgactgcgttcaagtcataaatcatcttgatactatccagtaaaccgtttttaagttctggaatattatcatcccattgtaaagcccctaattcgactatcgaatatcctgctctgatagcagtttcaatatcgacggacgtcaatactgtaataaaggtggtagtattgtcatcatcgtgataaactacgggaatatggtcgttagtaggtacggtaactttacacaacgcgatatataactttccttttgtaccatttttaacgtagttgggacgtcctgcagggtattgttttgaagaaatgatatcgagaacagatttgatacgatatttgttggattcctgattattcactataatataatctagacagatagatgattcgataaatagagaaggtatatcgttggtaggataatacatccccattccagtattctcggatactctattgatgacactagttaagaacatgtcttctattctagaaaacgaaaacatcctacatggactcattaaaacttctaacgctcctgattgtgtctcgaatgcctcgtacaaggatttcaaggatgccatagattctttgaccaacgatttagaattgcgtttagcatctgatttttttattaaatcgaatggtcggctctctggtttgctaccccaatgataacaatagtcttgtaaagataaaccgcaagaaaatttatacgcatccatccaaataaccctagcaccatcggatgatattaatgtattattatagattttccatccacaattattgggccagtatactgttagcaacggtatatcgaatagattactcatgtaacctactagaatgatagttcgtgtactagtcataatatctttaatccaatctaaaaaatttaaaattagattttttacactgttaaagttaacaaaagtattacccgggtacgtggatatcatatatggcattggtccattatcagtaatagctccataaactgatacggcgatggtttttatatgtgtttgatctaacgaggaagaaattcgcgcccacaattcatctctagatatgtatttaatatcaaacggtaacacatcaatttcgggacgcgtatatgtttctaaatttttaatccaaatataatgatgacctatatgccctattatcatactgtcaactatagtacacctagggaacttacgatacatctgtttcctataatcgttaaattttacaaatctataacatgctaaaccttttgacgacagccattcattaatttctgatatggaatctgtattctcgataccgtatcgttctaaagccagtgctatatctccctgttcgtgggaacgctttcgtataatatcgatcaacggataatctgaagtttttggagaataatatgactcatgatctatttcgtccataaacaatctagacataggaattggaggcgatgatcttaattttgtgcaatgagtcgtcaatcctataacttctaatcttgtaatattcatcatcgacataatactatctatgttatcatcgtatattagtataccatgaccttcttcatttcgtgccaaaatgatatacagtcttaaatagttacgcaatatctcaatagtttcataattgttagctgttttcatcaaggtttgtatcctgtttaacatgatggcgttctataacgtctctattttctatttttaattttttaaatttttaacgatttactgtggctagatacccaatctctctcaaatatttttttagcctcgcttacaagctgtttatctatactattaaaactgacgaatccgtgattttggtaatgggttccgtcgaaatttgccgaagtgatatgaacatattcgtcgtcgactatcaacaattttgtattattctgaatagtgaaaaccttcacagatagatcattttgaacacacaacgcatctagacttttggcggttgccatagaatatacgtcgttcttatcccaattaccaactagaagtctgatcttaactcctctattaatggctgcttctataatggagttgtaaatgtcgggccaatagtagctattaccgtcgacacgtgtagtgggaactatggccaaatgttcaatatctatactagtcttagctgacctgagtttatcaataactacatcggtatctagatctctagaatatcccaataggtgttccggagaatcagtaaagaacactccacctataggattcttaatatgatacgcagtgctaactggcaaacaacaagccgcagagcataaattcaaccatgaattttttgcgctattaaaggctttaaaagtatcaaatcttctacgaagatctgtggccagcgggggataatcagaatatacacctaacgttttaatcgtatgtatagatcctccagtaaatgacgcgtttcctacataacatctttcatcatctgacacccaaaaacaaccgagtagtagtcccacattattttttttatctatattaacggttataaaatttatatccgggcagtgactttgtagctctcccagatttcttttccctcgttcatctagcaaaactattattttaatccctttttcagatgcctcttttagtttatcaaaaataagcgctcccctagtcgtactcagaggattacaacaaaaagatgctatgtatatatatttcttagctagagtgataatttcgttaaaacattcaaatgttgttaaatgatcggatctaaaatccatattttctggtagtgtttctaccagcctacattttgctcccgcaggtaccgatgcaaatggccacatttagttaacataaaaacttatacatcctgttctatcaacgattctagaatatcatcggctatatcgctaaaattttcatcaaagtcgacatcacaacctaactcagtcaatatattaagaagttccatgatgtcatcttcgtctatttctatatccgtatccattgtagattgttgaccgattatcgagtttaaatcattactaatactcaatccttcagaatacaatctgtgtttcattgtaaatttataggcggtgtatttaagttggtagattttcaattatgtattaatatagcaacagtagttcttgctcctccttgattctagcatcctcttcattattttcttctacgtacataaacatgtccaatacgttagacaacacaccgacgatggcggccgctacagacacgaatatgactaaaccgatgaccatttaaaaacccctctctagctttcacttaaactgtatcgatcattcttttagcacatgtataatataaaaacattattctatttcgaatttaggcttccaaaaatttttcatccgtaaaccgataataatatatatagacttgttaatagtcggaataaatagattaatgcttaaactatcatcatctccacgattagagatacaatatttacattctttttgctgtttcgaaactttatcaatacacgttaatacaaacccaggaaggagatattgaaactgaggctgttgaaaatgaaacggtgaatacaataattcagataatgtaaaatcatgattccgtattctgatgatattagaactgctaatggatgtcgatggtatgtatctaggagtatctattttaacaaagcatcgatttgctaatatacaattatccttttgattaattgttattttattcatattcttaaaaggtttcatatttatcaattcttctacattaaaaatttccatttttaatttatgtagccccgcaatactcctcattacgtttcattttttgtctataatatccattttgttcatctcggtacatagattatccaattgagaagcgcatttagtagttttgtacattttaagtttattgacgaatcgtcgaaaactagttatagttaacattttattatttgataccctgatattaatacccctgccgttactattatttataactgatgtaatccacgtaacattggaattaactatcgatagtaatgcatcgacgcttccaaaattgtctattataaactcaccgataatttttttattgcatgttttcatattcattaggattatcaaatctttaatcttattacgattgtatgcgttgatattacaagacgtcattctaaaagacggaggatctccatcaaatgccagacaatcacgtacaaagtacatggaaataggttttgttctattgcgcatcatagatttatatagaacacccgtagaaatactaatttgttttactctataaaatactaatgcatctatttcatcgttttgtataacgtctttccaagtgtcaaattccaaatttttttcattgatagtaccaaattcttctatctctttaactacttgcatagataggtaattacagtgatgcctacatgccgttttttgaaactgaatagatgcgtctagaagcgatgctacgctagtcacaatcaccactttcatatttagaatatatatatgtaaaaatatagtagaatttcattttgtttttttctatgctataaatgaattctcattttgcatctgctcatactccgttttatattaataccaaagaaggaagatatctggttctaaaagccgttaaagtatgcgatgttagaactgtagaatgcgaaggaagtaaagcttcctgcgtactcaaagtagataaaccctcatcgcccgcgtgtgagagaagaccttcgtccccgtccagatgcgagagaatgaataaccctggaaaacaagttccgtttatgaggacggacatgctacaaaatatgttcgcggctaatcgcgataatgtagcttctagacttttgtcctaaaatactattatatccttttcgatattaataaatccgtgtcgtccaggttttttatctctttcagtatgtgaatagataggtattttatctctattcatcatcgaatttaagagatccgataaacattgtttgtattctccagatgtcagcatctgatacaacaatatatgtgcacataaacctctggcacttatttcatgtaccttccccttatcactaaggagaatagtatttgagaaatatgtatacatgatattatcatgaattagatatacagaatttgtaacactctcgaaatcacacgatgtgtcggcgttaagatctaatatatcactcgataacacattttcatctagatacactagacattttttaaagctaaaatagtctttagtagtaacagtaactatgcgattattttcatcgatgatacatttcatcggcatattattacgcttaccatcaaagactataccatgtgtatatctaacgtattctagcatggttgccatacgcgcattaaacttttcaggatctttggatagatcttccaatctatctatttgagaaaacatttttatcatgttcaatagttgaaacgtcggatccactatatagatattatctataaagattttaggaactacgttcatggtatcctggcgaatattaaaactatcaatgatatgattatcgttttcatcttttatcaccatatagtttctaagatatgggattttacttaatataatattatttcccgtgataaattttattagaaaggccaaatctataagaaaagtcctagaattagtctgaagaatatctatatcgccgtatagtatatttggattaattagatatagagaatatgatccgtaacatatacaacttttattatggcgtctaagatattcttccatcaacttattaacatttttgactagggaagatacattatgacgtcccattacttttgccttgtctattactgcgacgttcatagaatttagcatatctcttgccaattcttccattgatgttacattataagaaattttagatgaaattacatttggagctttaatagtaagaactcctaatatgtccgtgtatgtggtcactaatacagattgtagttctataatcgtaaataatttacctatattatatgtttgagtctgtttagaaaagtagctaagtatacgatcttttatttctgatgcagatgtattaacatcggaaaaaaatctttttttattcttttttactaaagatacaaatatgtctttgttaaaaacagttattttctgaatatttctagcttgtaattttaacatatgatattcgttcacactaggtactctgcctaaataggtttctataatctttaatgtaatattaggaaaagtattctgatcaggattcctattcattttgaggatttaaaactctgattattgtctaatatggtctctacgcaaactttttcacagagcgatagagtttttgataactcgtttttcttaagaaatataaaactactgtctccagagctcgctctatcttttattttatctaattcgatacaaactcctgatactggttcagaaagtaattcattaattttcagtcctttatagaagatatttaatatagataatacaaaatcttcagtttttgatatcgatctgattgatcctagaactagatatattaataacgtgctcattaggcagtttatggcagcttgataattagatatagtatattccagttcatatttattagataccgcattgcccagattttgatattctatgaattcctctgaaaataaatccaaaataactagacattctattttttgtggattagtgtactctcttccctctatcatgttcactactggtgtccacgatgataaatatctagagggaatataatatagtccataggatgccaatctagcaatgtcgaataactgtaattttattcttcgctcttcattatgaattgattcttgaggtataaacctaacacaaattatattattagacttttcgtatgtaatgtctttcatgttataagtttttaatcctggaatagaatctattttaatgaggcttttaaacgcagagttctccaacgagtcaaagcataatactctgttgtttttcttatatacgatgttacgattttcttctttgaatggaataggtttttgaattagtttataattacaacataatagataaggaagtgtgcaaatagtacgcggaaaaaacataatagctcccctgttttcatccatggttttaagtaaatgatcactggcttctttagtcaatggatattcgaacattaaccgtttcatcatcattggacagaatccatatttcttaatgtaaagagtgatcaaatcattgtgtttattgtaccatcttgttgtaaatgtgtattcggttatcggatctgctcctttttctattaaagtatcgatgtcaatctcgtctaagaattcaactatatcgacatatttcatttgtatacacataaccattactaacgtagaatgtataggaagagatgtaacgggaacagggtttgttgattcgcaaactattctaatacataattcttctgttaatacgtcttgcacgtaatctattatagatgccaagatatctatataattattttgtaagatgatgttaactatgtgatctatataagtagtgtaataattcatgtattttgatatatgttccaactctgtctttgtgatgtctagtttcgtaatatctatagcatcctcaaaaaatatattcgcatatattcccaagtcttcagttctatcttctaaaaaatcttcaacgtatggaatataataatctattttacctcttctgatatcattaatgatatagtttttgacactatcttctgtcaattgattcttattcactatatctaagaaacggatagcgtccctaggacgaactactgccattaatatctctattatagcttctggacataattcatctattataccagaattaatgggaactattccgtatctatctaacatagttttaagaaagtcagaatctaagacctgatgttcatatattggttcatacatgaaatgatctctattgatgatagtgactatttcattctctgaaaattggtaactcattctatatatgctttccttgttgatgaaggatagaatatactcaatagaatttgtaccaacaaactgttctcttatgaatcgtatatcatcatctgaaataatcatgtaaggcatacatttaacaattagagacttgtctcctgttatcaatatactattcttgtgataatttatgtgtgaggcaaatttgtccacgttctttaattttgttatagtagatatcaaatccaatggagctacagttcttggcttaaacagatatagtttttctggaacaaattctacaacattattataaaggactttgggtaaataagtgggatgaaatcctattttaattaatgcgatagccttgtcctcgtgcagatatccaaacgcttttgtgatagtatggcattcattgtctagaaacgctctacgaatatctgtgacagatatcatctttagagaatatactagtcgcgttaatagtactacaatttgtattttttaatctatctcaataaaaaaattaatatgtatgattcaatgtataactaaactactaactgttattgataactagaatcagaatctaatgatgacgtacccaagaagtttatctactgccaatttagctgcattatttttagcatctcgtttagattttccatctgccttatcgaatactcttccgtcgatatctacacaggcataaaatgtaggagagttactaggcccaactgattcaatacgaaaagaccaatctctcttagttatttggcagtactcattaataacggtgacagggttagcatctttccaatcaataatttttttagccggaataacatcatcaaaagacttatgatcctctctcattgatttttcgcgggatacatcatctattatgacgtcagccataacatcagcatccggcttatccgcctccgttgtcataaaccaacgaggaggaatatcgtcggagctgtacaccatagcactacgttgaagatcgtacagagctttattaacttctcgcttctccatattaagttgtctagttagttgtgcagcagtagctccttcgattccaatggttttaatagcctcacacacaatctctgcgttagaacgttcgtcgatatagattttagacatttttagagagaactaacacaaccagcaataaaactgaacctactttatcatttttttattcatcatcctctggtggttcgtcgttcctatcaaatgtagctctgattaacccgtcatctataggtgatgctggttctggagattctggaggagatggattattatctggaagaatctctgttatttccttgttttcatgtatcgattgcgttgtaacattaagattgcgaaatgctctaaatttgggaggcttaaagtgttgtttgcaatctctacacgcgtgtctaactagtggaggttcgtcagctgctctagtttgaatcatcatcggcgtagtattcctacttttacagttaggacacggtgtattgtatttctcgtcgagaacgttaaaataatcgttgtaactcacatcctttattttatctatattgtattctactcctttcttaatgcattttataccgaataagagatagcgaaggaattctttttcggtgccgctagtacccttaatcatatcacatagtgttttatattccaaatttgtggcaatagacggtttatttctatacgatagtttgtttctggaatcctttgagtattctataccaatattattctttgattcgaatttagtttcttcgatattagattttgtattacctatattcttgatgtagtactttgatgatttttccatggcccattctattaagtcttccaagttggcatcatccacatattgtgatagtaattctcggatatcagtagcggctaccgccattgatgtttgttcattggatgagtaactactaatgtatacattttccatttataacacttatgtattaactttgttcatttatattttttcattattatgttgatattaacaaaagtgaatatatatatatgttaataattgtattgtggttatacggctacaattttataatgagtgaaagtcagtgtccgatgatcaatgacgatagctttactctgaaaagaaagtatcaaatcgatagtgcggagtcaacaataaaaatggataagaagaggataaagtttcagaatagagccaaaatggtaaaagaaataaatcagacaataagagcagcacaaactcattacgagacattgaaactaggatacataaaatttaagagaatgattaggactactactctagaagatatagcaccatctattccaaataatcagaaaacttataaactattctcggacatttcagccatcggcaaagcatcacagaatccgagtaagatggtatatgctctgctgctttacatgtttcccaatttgtttggagatgatcatagattcattcgttatagaatgcatccaatgagtaaaatcaaacacaagatcttctctcctttcaaacttaatcttattagaatattagtggaagaaagattctataataatgaatgcagatctaataaatggaaaataattggaacacaagttgataaaatgttgatagctgaatctgataaatatacaatagatgcaaggtataacctaaaacccatgtatagaatcaagggagaatctgaagaagataccctcttcatcaaacagatggtagaacaatgtgtgacatcccaggaattggtggaaaaagtgttgaagatactgtttagagatttgttcaagagtggagaatacaaagcgtacagatacgatgatgatgtagaaaatggattcattggattggatacactaaaattaaacattgttcatgatatagttgaaccatgtatgcctgttcgtaggccagtggctaagatactgtgtaaagaaatggtaaataaatactttgagaatccgctacatattattggtaaaaatcttcaagagtgcattgactttgttagtgaataggcatttcatctttctccaatactaattcaaattgttaaattaataatggatagtataaatagttattagttataagatagtaaaaataattattagaataagagtgtagtatcatagataactctcttctataaaaatggattttattcgtagaaagtatcttatatacacagtagaaaataatatagattttttaaaggatgatacattaagtaaagtaaacaattttaccctcaatcatgtactagctctcaagtatctagttagcaattttcctcaacatgttattactaaggatgtattagctaataccaatttttttgttttcatacatatggtacgatgttgtaaagtgtacgaagcggttttacgacacgcatttgatgcacccacgttgtacgttaaagcattgactaagaattatttatcgtttagtaacgcaatacaatcgtacaaggaaaccgtgcataaactaacacaagatgaaaaatttttagaggttgccgaatacatggacgaattaggagaacttataggcgtaaattatgacttagttcttaatccattatttcacggaggggaacccatcaaagatatggaaatcatttttttaaaactgtttaagaaaacagacttcaaagttgttaaaaaattaagtgttataagattacttatttgggcatacctaagcaagaaagatacaggcatagagtttgcggataatgatagacaagatatatatactctatttcaacaaactggtagaatcgtccatagcaatctaacagaaacgtttagagattatatctttcccggagataagactagctattgggtgtggttaaacgaaagtatagctaatgatgcggatatcgttcttaatagacccgccattaccatgtatgataaaattcttagttatatatactctgagataaaacaaggacgcgttaataaaaacatgcttaagttagtttatatctttgagcctgaaaaagatatcagagaacttctgctagaaatcatatatgatattcctggagatatcctatctattattgatgcaaaaaacgacgattggaaaaaatattttattagtttttataaagctaattttattaacggtaatacatttattagtgatagaacgtttaacgaggacttattcagagttgttgttcaaatagatcccgaatatttcgataatgaacgaattatgtctttattctctacgagtgctgcggacattaaacgatttgatgagttagatattaataacagttatatatctaatataatttatgaggtgaacgatatcacattagatacaatggatgatatgaagaagtgtcaaatctttaacgaggatacgtcgtattatgttaaggaatacaatacatacctgtttttgcacgagtcggatcccatggtcatagagaacggaatactaaagaaactgtcatctataaaatccaagagtagacggctgaacttgtttagcaaaaacattttaaaatattatttagacggacaattggctcgtctaggtcttgtgttagatgattataaaggagacttgttagttaaaatgataaaccatcttaagtctgtggaggatgtatccgcattcgttcgattttctacagataaaaaccctagtattcttccatcgctaatcaaaactattttagctagttataatatttccatcatcgtcttatttcaaaggtttttgagagataatctatatcatgtagaagaattcttggataaaagcatccatctaaccaagacggataagaaatatatacttcaattgataagacacggtagatcatagaacagaccaaatatattattaataatttgtatatacatagatataattatcacacatttttgataaatgggaactgctgcaacaattcagactcccaccaaattaatgaataaagaaaatgcagaaatgattttggaaaaaattgttgatcatatagttatgtatattagtgacgaatcaagtgattcagaaaataatcctgaatatattgattttcgtaacagatacgaagactatagatctctcattataaaaagtgatcacgagtttgtaaagctatgtaaaaatcatgcggagaaaagttctccagaaacgcaacaaatgattatcaaacacatatacgaacaatatcttattccagtatctgaagtactattaaaacctataatgtccatgggtgacataattacatataacggatgtaaagacaatgaatggatgctagaacaactctctaccctaaactttaacaatctccgcacatggaactcatgtagcataggcaatgtaacgcgtctgttttatacattttttagttatctgatgaaagataaactaaatatataagtataatcccattctaatactttaacctgatgtattagcatcttattagaatattaacctaactaaaagacataacataaaaactcattacatagttgataaaaagcggtaggatataaatattatggctgccaccgttccgcgttttgacgacgtgtacaaaaatgcacaaagaagaattctagatcaagaaacattttttagtagaggtctaagtagaccgttaatgaaaaacacatatctatttgataattacgcgtatggatggataccagaaactgcaatttggagtagtagatacgcaaacttagatgcaagtgactattatcccatttcgttgggattacttaaaaagttcgagtttctcatgtctctatataaaggtcctattccagtatacgaagaaaaagtaaatactgaattcattgctaatggatctttctccggtagatacgtatcatatcttagaaagttttctgctcttccaacaaacgagtttattagttttttgttactgacttccattccaatctataatatcttgttctggtttaaaaatactcagtttgatattactaaacacacattattcagatacgtctatacagataatgccaaacacctggcgttggctaggtatatgtatcaaacaggagactataagcctttgtttagtcgtctcaaagagaattatatatttaccggtcccgttccaatatgtatcaaagatatagatcaccctaatcttagtagagcaagaagtccatccgattatgagacattagctaatattagtactatattgtactttaccaagtatgatccggtattaatgtttttattgttttacgtacctgggtattcaattactacaaaaattactccagccgtagaatatctaatggataaactgaatctaacaaagagcgacgtacaactgttgtaaattattttatgcttcgtaaaatgtaggttttgaaccaaacattctttcaaagaatgagatgcataaaactttattatccaatagattgactatttcggacgtcaatcgtttaaagtaaacttcgtaaaatattctttgatcactgccgagtttaaaacttctatcgataattgtttcatatgttttaatatttacaagttttttggtccatggtccattaggacaaatatatgcaaaataatatcgttctccaagttctatagtctctggattatttttattatattcagtaaccaaatacatattagggttatctgcggatttataatttgagtgatgcattcgactcaacataaataattctagaggagacgatctactatcaaattcggatcgtaaatctgtttctaaagaacggagaatatctatacatacctgattagaattcatccgtccttcagacaacatctcagacagtctggttttgtacatcttaatcatattcttatgaaacttggaaacatctcttctagtttcactagtacctttattaattctctcaggtacagattttgaattcgacgatgctgagtatttcatcgttgtatatttcttcttcgattgcataatcagattcttatataccgcctcaaactctattttaaaattattaaacaatactctattattaatcagtcgttctaactctttcgctatttctatagacttatctacatcttgactgtctatctctgtaaacacggagtcggtatctccatacacgctacgaaaacgaaatctgtaatctataggcaacgatgttttcacaatcggattaatatctctatcgtccatataaaatggattacttaatggattggcaaaccgtaacataccgttagataactctgctccatttagtaccgattctagatacaagatcattctacgtcctatggatgtgcaactcttagccgaagcgtatgagtatagagcactatttctaaatcccatcagaccatatactgagttggctactatcttgtacgtatattgcatggaatcatagatggccttttcagttgaactggtagcctgttttagcatctttttatatctggctctctctgccaaaaatgttcttaatagtctaggaatggttccttctatcgatctatcgaaaattgctatttcagagatgaggttcggtagtctaggttcacaatgaaccgtaatatatctaggaggtggatatttctgaagcaatagctgattatttatttcttcttccaatctattggtactaacaacgacaccgactaatgtttccggagatagatttccaaagatacacacattaggatacagactgttataatcaaagattaatacattattactaaacattttttgttttggagcaaataccttaccgccttcataaggaaacttttgttttgtttctgatctaactaagatagttttagtttccaacaatagctttaacagtggacccttgatgactgtactcgctctatattcgaataccatggattgaggaagcacatatgttgacgcacccgcgtctgtttttgtttctactccataatactcccacaaatactgacacaaacaagcatcatgaatacagtatctagccatatctaaagctatgtttagattataatccttatacatctgagctaaatcaacgtcatcctttccgaaagataatttatatgtatcattaggtaaagtaggacataatagtacgactttaaatccattttcccaaatatctttacgaattactttacatataatatcctcatcaacagtcacataattacctgtggttaaaacctttgcaaatgcagcggctttgcctttcgcgtccgtagtatcgtcaccgatgaacgtcatttctctaactcctttatttaatactttacccatgcaactgaacgcgttcttggatatagaatccaatttgtacgaatccaatttttcaaatttttgaatgaatgaatatagatcgaaaaatatagttccattattgttattaacgtgaaacgtagtattggccatgccgcctactcccttatgactagactgatttctctcataaatacagagatgtacagcttcctttttgtccggagatctaaagataatcttctctcctgttaataactctagacgattagtaatatatctcagatcaaagttatgtccgttaaaggtaacgacatagtcgaacgttagttccaacaattgtttagctattcgtaacaaaactatttcagaacataaaactagttctcgttcgtaatccatttccattagtgactgtatcctcaaacatcctctatcgacggcttcttgtatttcctgttccgttaacatctcttcattaatgagcgtaaacaataatcgtttaccacttaaatcgatataacagtaacttgtatgcgagattgggttaataaatacagaaggaaacttcttatcgaagtgacactctatatctagaaataagtacgatcttgggatatcgaatctaggtatttttttagcgaaacagttacgtggatcgtcacaatgataacatccattgttaatctttgtcaaatattgctcgtccaacgagtaacatccgtctggagatatcccgttagaaatataaaaccaactaatattgagaaattcatccatggtggcattttgtatgctgcgtttctttggctcttctatcaaccacatatctgcgacggagcattttctatctttaatatctagattataacttattgtctcgtcaatgtctatagttctcatctttcccaacggcctcgcattaaatggaggaggagacaatgactgatatatttcgtccgtcactacgtaataaaagtaatgaggaaatcgtataaatacggtctcaccatttcgacatctggatttcagatataaaaatctgttttcaccgtgactttcaaaccaattaatgcaccgaacatccatttatagaatttagaaatatattttcatttaaatgaatcccaaacattggggaagagccgtatggaccattatttttatagtactttcgcaagcgggtttagacggcaacatagaagcgtgtaaacgaaaactatatactatagttagcactcttccatgtcctgcatgtagacggcacgcgactatcgctatagaggacaataatgtcatgtctagcgatgatctgaattatatttattattttttcatcagattatttaacaatttggcatctgatcccaaatacgcgatcgatgtgacaaaggttaaccctttataaacttaacccattataaaacttatgattagtcacaactgaaataaccgcgtgattattttttggtataattctacacggcatggtttctgtgactatgaattcaacccccgttacattagtgaaatctttaacaaacagcaagggttcgtcaaagacataaaactcattgtttacaatcgaaatagaccccctatcacacttaaaataaaaaatatccttatcctttaccaccaaataaaattctgattggtcaatgtgaatgtattcacttaacagttccacaaatttatttattaactccgaggcacatacatcgtcggtattttttatggcaaactttactcttccagcatccgtttctaaaaaaatattaacgagttccatttatatcatccaatattattgaaatgacgttgatggacagatgatacaaataagaaggtacggtacctttgtccaccatctcctccaattcatgctctattttgtcattaactttaatgtatgaaaacagtacgccacatgcttccatgacagtgtgtaacactttggatacaaaatgtttgacattagtataattgttcaagactgtcaatctataatagatagtagctataatatattctatgatggtattgaagaagatgacaaccttggcatattgatcatttaacacagacatggtatcaacagatagcttgaatgaaagagaatcagtaattggaataagcgtcttctcgatagagtgtccgtataccaacatgtctgatattttgatgtattccattaaattatttagttttttctttttattctcgttaaacagcatttctgtcaacggaccccaacatcgttgaccgattaagttttgattgatttttccgtgtaaggcgtatctagtcagatcgtatagcctatccaataatccatcatctgtgcgtagatcacatcgtacactttttaattctctatagaagagcgacagacatctggagcaattacagacagcaatttctttattctctacagatgtaagatacttgaagacattcctatgatgatgcagaattttggataacacggtattgatggtatctgttaccataattcctttgatggctgatagtgtcagagcacaagatttccaatctttgacaatttttagcaccattatctttgttttgatatctatatcagacagcatggtgcgtctgacaacacagggattaagacggaaagatgaaatgattctctcaacatcttcaatagataccttgctattttttctggcattatctatatgtgcgagaatatcctctagagaatcagtatcctttttgatgatagtggatctcaatgacatgggacgtttaaaccttcttattctatcaccagattgcatggtgatttgtcttctttcttttatcataatgtaatctctaaattcatcggcaaattgtctatatctaaaatcataatatgagatgtttacctctacaaatatctgttcgtccaatgttagagtatttacatcagttttgtattccaaattaaacatggcaacggatttaattttatattcctctattaagtcctcgtcgataataacagaatgtagataatcatttaatccatcgtacatggttggaagatgcttgttgacaaaatctttaattgtcttgatgaaggtgggactatatctaacatcttgattaataaaatttataacattgtccataggatactttgtaactagttttatacacatctcttcatcggtaagtttagacagaatatcgtgaacaggtggtatattatattcatcagatatacgaagaacaatgtccaaatctatattgtttaatatattatatagatgtagcgtagctcctacaggaatatctttaactaagtcaatgatttcatcaaccgttagatctattttaaagttaatcatataggcattgatttttaaaaggtatgtagccttgactacattctcattaattaaccattccaagtcactgtgtgtaagaagattatattctatcataagcttgactacatttggtcccgataccattaaagaattcttatgatataaggaaacagcttttaggtactcatctactctacaagaattttggagagccttaacgatatcagtgacgtttattatttcaggaggaaaaaacctaacattgagaatatcggaattaatagcttccagatacagtgattttggcaatagtccgtgtaatccataatccagtaacacgagctggtgcttgctagacaccttttcaatgtttaatttttttgaaataagctttgataaagccttcctcgcaaattccggatacatgaacatgtcggcgacatgattaagtattgttttttcattattttctcaataccccaatagatgatagaatatcacccaatgcgtccatgttgtctatttccaacaggtcgctatatccaccaatagaagtttttccaaaaaagattctaggaacagttctaccaccagtaatttgttcaaaatagtcacgcaattcattttcgggtttaaattctttaatatcgacaatttcatacgctcctcttttgaaactaaacttatttagaatatccagtgcatttctacaaaaaggacatgtatacttgacaaaaattgtcactttgttattggccaacctttgttgtacaaattcctcggccattttaatatttaagtgatataaaactatctcgacttatttaactctttagtcgagatatatggacgcagatagctatatgatagccaactacagaaggcaaacgctataaaaaacataattacgacgagcatatttataaatatttttattcagcattacttgatatagtaatattaggcacagtcaaacattcaaccactctcgatacattaactctctcattttctttaacaaattctgcaatatcttcgtaaaaagattcttgaaactttttagaatatctatcgactctagatgaaatagcgttcgtcaacatactatgttttgtatacataaaggcgcccattttaacagtttctagtgacaaaatgctagcgatcctaggatcctttagaatcacatagattgacgattcgtctctcttagtaactctagtaaaataatcatacaatctagtacgcgaaataatattatccttgacttgaggagatctaaacaatctagttttgagaacatcgataagttcatcgggaatgacatacatactatctttaatagaactcttttcatccagttgaatggattcgtccttaaccaactgattaatgagatcttctattttatcattttccagatgatatgtatgtccattaaagttaaattgtgtagcgcttctttttagtctagcagccaatactttaacatcactaatatcgatatacaaaggagatgatttatctatggtattaagaattcgtttttcgacatccgtcaaaaccaattcctttttgcctgtatcatccagttttccatcctttgtaaagaaattattttctactagactattaataagactgataaggattcctccataattgcacaatccaaactttttcacaaaactagactttacaagatctacaggaatgcgtacttcaggttttttagcttgtgattttttcttttgcggacattttcttgtgaccaactcatctaccatttcattgattttagcagtgaaataagctttcaatgcacgggcactgatactattgaaaacgagttgatcttcaaattccgccatttaagttcaccaaacaacttttaaatacaaatatatcaatagtagtagaataagaactataaaaaaaataataattaaccaataccaaccccaacaaccggtattattagttgatgtgactgttttctcatcacttagaacagatttaacaatttctataaagtctgtcaaatcatcttccggagaccccataaatacaccaaatatagcggcgtacaacttatccatttatacattgaatattggcttttctttatcgctatcttcatcatattcatcatcaatatcaacaagtcccagattacgagccagatcttcttctacattttcagtcattgatacacgttcactatctccagagagtccgataacgttagccaccacttctctatcaatgattagtttcttgagcgcgaaagtaatttttgtttccgttccggatctatagaagacgataggtgtgataattgccttggccaattgtctttctcttttactgagtgattctagttcaccttctatagatctgagaatggatgattctccagtcgaaacatattctaccatggatccgtttaatttgttgatgaagatggattcatccttaaatgttttctctgtaatagtttccaccgaaagactatgcaaagaatttggaatgcgttccttgtgcttaatgtttccatagacggcttctagaagttgatacaacataggactagccgcggtaacttttatttttagaaagtatccatcgcttctatcttgtttagatttatttttataaagtttagtctctccttccaacataataaaagtggaagtcatttgactagataaactatcagtaagttttatagagatagacgaacaattagcgtattgagaagcatttagtgtaacgtattcgatacattttgcattagatttactaatcgattttgcatactctataacacccgcacaagtctgtagagaatcgctagatgcagtaggtcttggtgaagtttcaactctcttcttgattaccttactcatgattaaacctaaataattgtactttgtaatataatgatatatattttcactttatctcatttgagaataaaaatgtttttgtttaaccactgcatgatgtacagatttcggaatcgcaaaccaccagtggttttattttatccttgtccaatgtgaattgaatgggagcggatgcgggtttcgtacgtagatagtacattcccgtttttagaccgagactccatccgtaaaaatgcatactcgttagtttggaataactcggatctgctatatggatattcatagattgactttgatcgatgaaggctcccctgtctgcagccatttttatgatcgtcttttgtggaatttcccaaatagttttataaactcgcttaatatcttctggaaggtttgtattctgaatggatccaccatctgccataatcctattcttgatctcatcattccataattttctctcggttaaaactctaaggagatgcggattaactacttgaaattctccagacaatactctccgagtgtaaatattactggtatacggttccaccgactcattatttcccaaaatttgagcagttgatgcagtcggcataggtgccaccaataaactatttctaagaccgtatgttctgattttatcttttagaggttcccaattccaaagatccgacggtacaacattccaaagatcatattgtagaataccgttactggcgtacgatcctacatatgtatcgtatggtccttccttctcagctagttcacaactcgcctctaatgcaccgtaataaatggtttcgaagatcttcttatttagatcttgtgcttccaggctatcaaatggataatttaagagaataaacgcgtccgctaatccttgaacaccaataccgataggtctatgtctcttattagagatttcagcttctggaataggataataattaatatctataattttattgagatttctgacaattactttgaccacatccttcagtttgagaaaatcaaatcgcccatctattacaaacatgttcaaggcaacagatgccagattacaaacggctacctcattagcatccgcatattgtattatctcagtgcaaagattactacacttgatagttcctaaattttgttgattactctttttgttacacgcatccttataaagaatgaatggagtaccagtttcaatctgagattctataatcgctttccagacgactcgagcctttattatagatttgtatctcctttctctttcgtatagtgtatacaatcgttcgaactcgtctccccaaacattgtccaatccaggacattcatccggacacatcaacgaccactctccgtcatccttcactcgtttcataaagagatcaggaatccaaagagctataaatagatctctggttctatgttcctcgtttcctgtattctttttaagatcgaggaacgccataatatcagaatgccacggttccaagtatatggccataactccaggccgtttgtttcctccctgatctatgtatctagcggtgttattataaactctcaacattggaataataccgtttgatataccattggtaccggagatatagcttccactggcacgaatattactaattgatagacctattccccctgccattttagagattaatgcgcatcgttttaacgtgtcatagataccctctatgctatcatcgatcatgttaagtagaaaacagctagacatttggtgacgactagttcccgcattaaataaggtaggagaagcgtgcgtaaaccatttttcagaaagtagattgtacgtctcaatagctgagtctatatcccattgatgaattcctactgcgacacgcattaacatgtgctgaggtctttcaacgatcttgttgtttattttcaacaagtaggatttttccaaagttttaaaaccaaaatagttgtatgaaaagtctcgttcgtaaataataaccgagttgagtttatccttatatttgttaactatatccatggtgatacttgaaataatcggagaatgtttcccatttttaggattaacatagttgaataaatcctccatcacttcactaaatagtttttttgtttccttgtgtagatttgatacggctattctggcggctagaatggcataatccggatgttgtgtagtacaagtggctgctatttcggctgccagagtgtccaattctaccgttgttactccattatatattccttgaataaccttcatagctattttaataggatctatatgatccgtgtttaagccataacataattttctaatacgagacgtgattttatcaaacatgacattttccttgtatccatttcgtttaatgacaaacatttttgttggtgtaataaaaaaattatttaacttttcattaatagggatttgacgtatgtagcgtacaaaatgatcgttcctggtatatagataaagagtcctatatatttgaaaatcgttacggctcgattaaactttaatgattgcatagtgaatatatcattaggatttaactccttgactatcatggcggcgccagaaattaccatcaaaagcattaatacagttatgccgatcgcagttagaacggttatagcatccaccatttatatctaaaaattagatcaaagaatatgtgacaaagtcctagttgtatactgagaattgacgaaacaatgtttcttacatatttttttcttattagtaactgacttaatagtaggaactggaaagctagacttgattattctataagtatagatacccttccaaataatattctctttgataaaagttccagaaaatgtagaattttttaaaaagttatcttttgctattaccaagattgtgtttagacgcttattattaatatgagtgatgaaatccacaccgcctctagatatcgcctttatttccacattagatggtaaatccaatagtgaaactatctttttaggaatgtatggactcgcgtttagaggagtgaacgtcttgggcgtcggaaaggatgattcgtcaaacgaataaacaatttcacaaatggatgttaatgtattagtaggaaattttttgacgctagtggaattgaagattctaatggatgatgttctacctatttcatccgataacatgttaatttccgacaccaacggttttaatatttcgatgatatacggtagtctctctttcggacttatatagcttattccacaatacgagtcattatatactccaaaaaacaaaataactagtataaaatctgtatcgaatgggaaaaacgaaattatcgacataggtatagaatccggaacattgaacgtattaatacttaattctttttctgtggtaagtaccgataggttattgacattgtatggttttaaatattctataacttgagacttgatagatattagtgatgaattgaaaattatttttatcaccacgtgtgtttcaggatcatcgtcgacgcccgtcaaccaaccgaatggagtaaaataaatatcattaatatatgctctagatattagtatttttatcaatcctttgattatcatcttctcgtaggcgaatgattccatgatcaagagtgatttgagaacatcctccggagtattaatgggcttagtaaacagtccatcgttgcaataataaaagttatccaagttaaaggatattatgcattcgtttaaagatatcacctcatctgacggagacaattttttggtaggttttagagactttgaagctacttgtttaacaaagttattcatcgtcgtctactattctatttaattttgtagttaatttatcacatatcacattaattgactttttggtccatttttccatacgtttatattcttttaatcctgcgttatccgtttccgttatatccagggatagatcttgcaagttaaatagaatgctcttaaataatgtcattttcttatccgctaaaaatttaaagaatgtataaacctttttcagagatttgaaacttttaggtggagttctagtacacaatatcataaacaaactaataaacattccacattcagattccaacagctgattaacttccacattaatacagcctattttcgctccaaatgtacattcgaaaaatctgaataaaacatcgatgtcacaatttgtattatccaatacagaatgtttgtgattcgtgttaaaaccatcggagaaggaataaaaataaaaattattatagtggtggaattcagttggaatattgcctccggagtcataaaaggatactaaacattgttttttatcataaattacacatttccaatgagacaaataacaaaatccaaacattacaaatctagaggtagaacttttaattttgtctttaagtatatacgataagatatgtttattcataaacgcgtcaaatttttcatgaatcgctaaggagtttaagaatctcatgtcaaattgtcctatataatccacttcggatccataagcaaactgagagactaagttcttaatacttcgattgctcatccaggctcctctctcaggctctattttcatcttgacgacctttggattttcaccagtatgtattcctttacgtgataaatcatcgattttcaaatccatttgtgagaagtctatcgccttagatactttttcccgtagtcgaggtttaaaaaaatacgctaacggtatactagtaggtaactcaaagacatcatatatagaatggtaacgcgtctttaactcgtcggttaactctttcttttgatcgagttcgtcgctactattgggtctgctcaggtgccccgactctactagttccaacatcataccgataggaatacaagacactttgccggcggttgtagatttatcatatttctccactacatatccgttacaatttgttaaaaatttagatacatctatattgctacataatccagctagtgaatatatatgacataataaattggtaaatcctagttctggtattttactaattactaaatctgtatatctttccatttatcatggaaaagaatttaccagatatcttcttttttccaaactgcgttaatgtattctcttacaaatattcacaagatgaattcagtaatatgagtaaaacggaacgtgatagtttctcattggccgtgtttccagttataaaacatagatggcataacgcacacgttgtaaaacataaaggaatatacaaagttagtacagaagcacgtggaaaaaaagtatctcctccatcactaggaaaacccgcacacataaacctaaccgcgaagcaatatatatacagtgaacacacaataagctttgaatgttatagttttctaaaatgtataacaaatacagaaatcaattcgttcgatgagtatatattaagaggactattagaagctggtaatagtttacagatattttccaattccgtaggtaaacgaacagatactataggtgtactagggaataagtatccatttagcaaaattccattggcctcattaactcctaaagcacaacgagagatattttcagcgtggatttctcatagacctgtagttttaactggaggaactggagtgggtaagacgtcacaggtacccaagttattgctttggtttaattatttatttggtggattctctactctagataaaatcactgactttcacgaaagaccagtcattctatctcttcctaggatagctttagttagattgcatagcaataccattttaaaatcattgggatttaaggtactagatggatctcctatttctttacggtacggatctataccggaagaattaataaacaaacaaccaaaaaaatatggaattgtattttctacccataagttatctctaacaaaactatttagttatggcactcttattatagacgaagttcatgagcatgatcaaataggagatattattatagcagtagcgagaaagcatcatacgaaaatagattctatgtttttaatgactgccacgttagaggatgacagggaacggctaaaagtatttttacctaatcccgcatttatacatattcctggagatacactgtttaaaattagcgaggtatttattcataataagataaatccatcttccagaatggcatacatagaagaagaaaagagaaatttagttactgctatacagatgtatactcctcctgatggatcatccggtatagtctttgtggcatccgttgcacagtgtcacgaatataaatcatatttagaaaaaagattaccgtatgatatgtatattattcatggtaaggtcttagatatagacgaaatattagaaaaagtgtattcatcacctaatgtatcgataattatttctactccttatttggaatccagcgttactatacgcaatgttacacacatttatgatatgggtagagtttttgtccccgctccttttggaggatcgcaacaatttatttctaaatctatgagagatcaacgaaaaggaagagtaggaagagttaatcctggtacatacgtctatttctatgatctgtcttatatgaagtctatacagcgaatagattcagaatttctacataattatatattgtacgctaataagtttaatctaacactccccgaagatttgtttataatccctacaaatttggatattctatggcgtacaaaggaatatatagactcgttcgatattagtacagaaacatggaataaattattatccaattattatatgaagatgatagagtatgctaaactttatgtactaagtcctattctcgctgaggagttggataactttgagaggacgggagaattaactagtattgtacaagaagccattttatctctaaatttacaaattaagattttaaattttaaacataaagatgatgatacgtatatacacttttgtaaaatattattcggtgtctataacggaacaaacgctactatatattatcatagacctctaacgggatatatgaatatgatttcagatactatatttgttcctgtagataataactaaaaattaaactctaatgaccacatctttttttagagatgaaaaattttccacatctccttttgtagacacgactaaacattttgcagaaaaaagtttattagtgtttagataatcgtatacttcatcagtgtagatagtaaatgtgaacagataaaaggtattcttgctcaatagattggtaaattccatagaatatattaatcctttcttcttgagatcccacatcatttcaaccagagacgttttatccaatgatttacctcgtactataccacatacaaaactagattttgcagtgacgtcgtacctggtattcctaccaaacaaaattttacttttagttcttttagaaaattctaaggtagaatctctatttgccaatatgtcatctatggaattaccactagcaaaaaatgatagaaatatatattgatacatcgcagctggttttgatctactatactttaaaaacgaatcagattccataattgcctgtatatcatcagctgaaaaactatgttttacacgtattccttcggcatttctttttaatgatatatcttgtttagacaatgataaagttatcatgtccatgagagacgcgtctccgtatcgtataaatatttcattagatgttagacgcttcattaggggtatacttctataaggtttcttaatcagtccatcattggttgcgtcaagaactactatcggatgttgttgggtatctctagtgttacacatggccttactaaagtttgggtaaataactatgatatctctattaattatagatgcatatatttcattcgtcaaggatattagtatcgacttgctatcgtcattaatacgtgtaatgtaatcatataaatcatgcgatagccaaggaaaatttaaatagatgttcatcatataatcgtcgctataattcatattaatacgttgacattgactaatttgtaatatagcctcgccacgaagaaagctctcgtattcagtttcatcgataaaggataccgttaaatataactggttgccgatagtctcatagtctattaagtggtaagtttcgtacaaatacagaatccctaaaatattatctaatgttggattaatctttaccataactgtataaaatggagacggagtcataactattttaccgtttgtacttactggaatagatgaaggaataatctccggacatgctggtaaagacccaaatgtctgtttgaagaaatccaatgttccaggtcctaatctcttaacaaaaattacgatattcgatcccgatatcctttgcattctatttaccagcatatcacgaactatattaagattatctatcatgtctattctcccaccgttatataaatcgcctccgctaagaaacgttagtatatccatacaatggaatacttcatttctaaaatagtattcgttttctaattctttaatgtgaaatcgtatactagaaagggaaaaattatctttgagttttccgttagaaaagaaccacgaaactaatgttctgattgcgtccgattccgttgctgaattaatggatttacaccaaaaactcatataacttctagatgtagaagcattcgctaaaaaattagtagaatcaaaggatataagtagatgttccaacaagtgagcaattcccaagatttcatctatatcattctcgaatccgaaattagaaattcccaagtagatatcctttttcatccgatcgttgatgaaaatacgaactttattcggtaagacaatcatttactaaggagtaaaataggaagtaatgttcgtatgtcgttatcatcgtataaattaaaggtgtgttttttaccattaagtgacattataattttaccaatattggaattataatataggtgtatttgcgcactcgcgacggttgatgcatcggtaaatatagctgtatctaatgttctagtcggtatttcatcatttcgctgtctaataatagcgttttctctatctgtttccattacagctgcctgaagtttattggtcggataatatgtaaaataataagaaatacatacgaataacaaaaataaaataagatataataaagatgccatttagagatctaattttgtttaacttgtccaaattcctacttacagaagatgaggaatcgttggagatagtgtcttccttatgtagaggatttgaaatatcttataatgacttgataacttactttccagataggaaataccataaatatatttataaagtatttgaacatgtagatttatcggaggaattaagtatggaattccatgatacaactctgagagatttagtctatcttagattgtacaagtattccaagtgtatacggccgtgttataaattaggagataatctaaaaggcatagttgttataaaggacaggaatatttatattagggaagcaaatgatgacttgatagaatatctcctcaaggaatacactcctcagatttatacatattctaatgagcgcgtccccataactggttcaaaattaattctttgtggattttctcaagttacatttatggcgtatacaacgtcgcatataacaacaaataaaaaggtagatgttctcgtttccaaaaaatgtatagatgaactagtcgatccaataaattatcaaatacttcaaaatttatttgataaaggaagcggaacaataaacaaaatactcaggaagatattttattcggtaacaggtggccaaactccataggtagctttttctatttcggattttagaatttccaaattcaccagcgatttatcggttttggtgaaatccaaggatttattaatgtccacaaatgccatttgttttgtctgtggattgtatttgaaaatggaaacgatgtagttagatagatgcgctgcaaagtttcctattagggttccgcgctttacgtcacccagcatacttgaatcaccatcctttaaaaaaaatgataagatatcaacatggagtatatcatactcggattttaattcttctactgactcactgacattttcacaaatactacaatacggtttaccgaaaataatcagtacgttcttcatttatgggtatcaaaaacttaaaatcgttactgctggaaaataaatcactgacgatattagatgataatttatacaaagtatacaatggaatatttgtggatacaatgagtatttatatagccgtcgccaattgtgtcagaaacttagaagagttaactacggtattcataaaatacgtaaacggatgggtaaaaaagggagggcatgtaaccctttttatcgatagaggaagtataaaaattaaacaagacgttagagacaagagacgtaaatattctaaattaaccaaggacagaaaaatgttagaattagaaaagtgtacatccgaaatacaaaatgttaccggatttatggaagaagaaataaaggcagaaatgcaattaaaaatcgataaactcacatttcaaatatatttatctgattctgataacataaaaatatcattgaatgagatactaacacatttcaacaataatgagaatgttacattattttattgtgatgaacgagacgcagaattcgttatgtgtctcgaggctaaaacacatttctctaccacaggagaatggccgttgataataagtaccgatcaggatactatgctatttgcatctactgataatcatcctaagatgataaaaaacttaactcaactgtttaaatatgttccctctgcagaggataactatttagcaaaattaacggcgttagtgaatggatgtgatttctttcctggactctatggggcatctataacacccaccaacttaaacaaaatacaattgtttagtgattttacaatcgataatatagtcactagtttggcaattaaaaattattatagaaagactaactctaccgtagacgtgcgtaatattgttacgtttataaacgattacgctaatttagacgatgtctactcgtatattcctccttgtcaatgcactgttcaagaatttatattttccgcattagatgaaaaatggaatgaatttaaatcatcttatttagagaccgttccgttaccctgtcaattaatgtacgcgttagaaccacgtaaggagattgatgtttcagaagttaaaactttatcatcttatatagatttcgaaaatactaaatcagatatcgatgttataaaatctatatcctcgatcttcggatattctaacgaaaactgtaacacgatagtattcggcatctataaggataatttactactgagtataaataattcattttactttaacgatagtctgttaataaccaatactaaaagtgataatataataaatataggttactagattaaaaatggtgttccaactcgtgtgctctacgtgcggcaaagatatttctcacgaacgatataaattgattatacgaaaaaaatcattaaaggatgtactcgtcagtgtaaagaacgaatgttgtaggttaaaattatctacacaaatagaacctcaacgtaacttaacagtgcaacctctattggatataaactaatatggatccggttaattttatcaagacatatgcgcctagaggttctattatttttattaattataccatgtcattaacaagtcatttgaatccatcgatagaaaaacatgtgggtatttattatggtacgttattatcggaacacttggtagttgaatcaacatatagaaaaggagttcgaatagtcccattggatagtttttttgaaggatatcttagtgcaaaagtatacatgttagagaatattcaagttatgaaaatagcagctgatacgtcattaactttattgggtattccgtatggatttggtcataatagaatgtattgttttaaattggtagctgactgttataaaaatgccggtattgatacatcgtctaaacgaatattaggtaaagatatttttctgagccaaaacttcacagacgataatagatggataaagatatatgattctaataatttaacattttggcaaattgattaccttaaagggtgagttaatatgcataactactcctccgttgttttttccctcgttctttttcttaacgttgtttgccatcactctcataatgtaaagatattctaaaatggtaaacttttgcatatcggacgcagaaattggtataaatgttgtaattgtattatttcccgtcaatggactagtcacagctccatcagttttatatcctttagagtatttctcactcgtgtctagcattctagagcattccatgatctgtttatcgttgatattggccggaaagatagattttttattttttattatattactattggcaattgtagatataacttctggtaaatatttttctaccttttcaatctcttctattttcaagccggctatatattctgctatattgttgctagtatcaataccttttcttgctaagaagtcatatgtggtattcactatatcagttttaactggtagttccattagcctttccacttctgcagaataatcagaaattggttctttaccagaaaatccagctactataataggctcaccgatgatcattggcaaaatcctatattgtaccagattaatgagagcatatttcatttccaataattctgctagttcttgagacattgatttatttgatgaatctagttggttctctagatactctaccatttctgccgcatacaataacttgttagataaaatcagggttatcaaagtgtttagcgtggctagaatagtgggcttgcatgtattaaagaatgcggtagtatgagtaaaccgttttaacgaattatatagtctccagaaatctgtggcgttacatacatgagccgaatgacatcgaagattgtccaatatttttaatagctgctctttgtccattatttctatatttgactcgcaacaattgtagataccattaatcaccgattcctttttcgatgctggacaatagcacaattgtttagctttggactctatgtattcagaattaatagatatatctctcaatacagattgcactatacattttgaaactatgtcaaaaattgtagaacgacgctgttctgcagccatttaactttaaataatttacaaaaatttaaaatgagcatccgtataaaaatcgataaactgcgccaaattgtggcatatttttcagagttcagtgaagaagtgtctataaatgtagactcgacggatgagttaatgtatatttttgccgccttgggcggatctgtaaacatttgggcaattatacctctaagtgcatcagtgttttaccgaggagccgaaaatattgtgtttaatcttcctgtgtccaaggtaaaatcgtgtttgtgtagttttcacaatgatgccatcatagatatagaacctgatctggaaaataatctagtaaaactttctagttatcatgtagtaagtgtcgattgtaacaaggaactgatgcctattaggacagatactactatttgtctaagtatagatcaaaagaaatcttacgtgtttaattttcacaagtatgaagaaaaatgttgtggtagaaccgtcattcatctagaatggttgttgggctttatcaagtgtattagtcagcatcagcatctggctattatgtttaaagatgacaatattattatgaagactcctggtaatactgatgcgttttccagggaatattctatgactgaatgttctcaagaactacaaaagttttctttcaaaatagctatctcgtctctcaacaaactacgaggattcaaaaagagagtcaatgtttttgaaactagaatcgtaatggataatgacgataacattttaggaatgttgttttcggatagagttcaatcctttaagatcaacatctttatggcgtttttagattaatactttcaatgagataaatatgggtggcggagtaagtgttgagctccctaaacgggatccgcctccgggagtacccactgatgagatgttattaaacgtggataaaatgcatgacgtgatagctcccgctaagcttttagaatatgtgcatataggaccactagcaaaagataaagaggataaagtaaagaaaagatatccagagtttagattagtcaacacaggacccggtggtctttcggcattgttaagacaatcgtataatggaaccgcacccaattgctgtcgcacttttaatcgtactcattattggaagaaggatggaaagatatcagataagtatgaagagggtgcagtattagaatcgtgttggccagacgttcacgacactggaaaatgcgatgttgatttattcgactggtgtcagggggatacgttcgatagaaacatatgccatcagtggatcggttcagcctttaataggagtaatagaactgtagagggtcaacaatcgttaataaatctgtataataagatgcaaacattatgtagtaaagatgctagtgtaccaatatgcgaatcatttttgcattatttacgcgcacacaatacagaagatagcaaagagatgatcgattatattctaagacaacagtctgcggactttaaacagaaatatatgagatgtagttatcccactagagataagttagaagagtcattaaaatatgcggaacctcgagaatgttgggatccagagtgttcgaatgccaatgttaatttcttactaacacgtaattataataatttaggactttgcaatattgtacgatgtaataccagcgtgaacaacttacagatggataaaacttcctcattaagattgtcatgtggattaagcaatagtgatagattttctactgttcccgtcaatagagcaaaagtagttcaacataatattaaacactcgttcgacctaaaattgcatttgatcagtttattatctctcttggtaatatggatactaattgtagctatttaaatgggtgccgcggcaagcatacagacgacggtgaatacactcagcgaacgtatctcgtctaaattagaacaagaagcgaacgctagtgctcaaacaaaatgtgatatagaaatcggaaatttttatatccgacaaaaccatggatgtaacctcactgttaaaaatatgtgctctgcggacgcggatgctcagttggatgctgtgttatcagccgctacagaaacatatagtggattaacaccggaacaaaaagcatacgtgccagctatgtttactgctgcgttaaacattcagacgagtgtaaacactgttgttagagattttgaaaattatgtgaaacagacttgtaattctagcgcggtcgtcgataacaaattaaagatacaaaacgtaatcatagatgaatgttacggagccccaggatctccaacaaatttggaatttattaatacaggatctagcaaaggaaattgtgccattaaagcgttgatgcaattgacgactaaggccactactcaaatagcacctagacaagttgctggtacaggagttcagttttatatgattgttatcggtgttataatattggcagcgttgtttatgtactatgccaagcgtatgttgttcacatccaccaatgataaaatcaaacttattttagccaataaggaaaacgtccattggactacttacatggacacattctttagaacttctccgatggttattgctaccacggatatgcaaaactgaaaatatattgataatattttaatagattaacatggaagttatcgctgatcgtctagacgatatagtgaaacaaaatatagcggatgaaaaatttgtagattttgttatacacggtctagagcatcaatgtcctgctatacttcgaccattaattaggttgtttattgatatactattatttgttatagtaatttatatttttacggtacgtctagtaagtagaaattatcaaatgttgttggtggtgctagtcatcacattaactattttttattactttatactataatagtactagactgacttctaacaaacatctcacctgccataaataaatgcttgatattaaagtcttctatttctaacactattccatctgtggaaaataatactctgacattatcgctaattgacacatcggtgagtgatatgcctataaagtaataatcttctttgggcacatataccagtgtaccaggttctaacaacctatttactggtgctcctgtagcatactttttctttaccttgagaatatccatcgtttgcttggtcaatagcgatatgtgattttttatcaaccactcaaaaaagtaattggagtgttcatatcctctacgggctattgtctcatggccgtgtatgaaatttaagtaacacgactgtggtagatttgttctatagagccgattgccgcaaatagatagaactaccaatatgtctgtacaaatgttaaacattaattgattaacagaaaaaacaatgttcgttctgggaatagaaaccagatcaaaacaaaattcgttagaatatatgccacgtttatacatggaatataaaataactacagtttgaaaaataacagtatcatttaaacatttaacttgcggggttaatctcacaactttactgtttttgaactgttcaaaatatagcatcgatccgtgagaaatacgtttagccgcctttaatagaggaaatcccaccgcctttctggatctcaccaacgacgatagttctgaccagcaactcatttcttcatcatccacctgttttaacatataataggcaggagatagatatccgtcattgcaatattccttctcgtaggcacacaatctaatattgataaaatctccattctcttctctgcatttattatcttgtctcggtggctgattaggctgtggtcttggtttaggctttggtatatcgttgttgaatctattttggtcattaaatctttcatttcttcctggtatatttttatcacctcgtttggttggatttttgtctatattatcgtttgtaacatcggtacgggtattcatttatcacaaaaaaaacttctctaaatgagtctactgctagaaaacctcatcgaagaagataccatattttttgcaggaagtatatctgagtatgatgatttacaaatggttattgccggcgcaaaatccaaatttccaagatctatgctttctatttttaatatagtacctagaacgatgtcaaaatatgagttggagttgattcataacgaaaatatcacaggagcaatgtttaccacaatgtataatataagaaacaatttgggtctaggagatgataaactaactattgaagccattgaaaactatttcttggatcctaacaatgaagttatgcctcttattattaataatacggatatgactgccgtcattcctaaaaaaagtggtaggagaaagaataagaacatggttatcttccgtcaaggatcatcacctatcttgtgcattttcgaaactcgtaaaaagattaatatttataaagaaaatatggaatccgcgtcgactgagtatacacctatcggagacaacaaggctttgatatctaaatatgcgggaattaatgtcctgaatgtgtattctccttccacatccataagattgaatgccatttacggattcaccaataaaaataaactagagaaacttagtactaataaggaactagaatcgtatagttctagccctcttcaagaacccattaggttaaatgattttctgggactattggaatgtgttaaaaagaatattcctctaacagatattccgacaaaggattgattactataaatggagaatgttcctaatgtatactttaatcctgtgtttatagagcccacgtttaaacattctttattaagtgtttataaacacagattaatagttttatttgaagtattcgttgtattcattctaatatatgtattttttagatctgaattaaatatgttcttcatgcctaaacgaaaaatacccgatcctattgatagattacgacgtgctaatctagcgtgtgaagacgataaattaatgatctatggattaccatggatgacaactcaaacatctgcgttatcaataaatagtaaaccgatagtgtataaagattgtgcaaagcttttgcgatcaataaatggatcacaaccagtatctcttaacgatgttcttcgcagatgatgattcattttttaagtatttggctagtcaagatgatgaatcttcattatctgatatattgcaaatcactcaatatctagactttctgttattattattgatccaatcaaaaaataaattagaagctgtgggtcattgttatgaatctctttcagaggaatacagacaattgacaaaattcacagactttcaagattttaaaaaactgtttaacaaggtccctattgttacagatggaagggtcaaacttaataaaggatatttgttcgactttgtgattagtttgatgcgattcaaaaaagaatcctctctagctaccaccgcaatagatcctgttagatacatagatcctcgtcgtgatatcgcattttctaacgtgatggatatattaaagtcgaataaagtgaacaataattaattctttattgtcatcatgaacggcggacatattcagttgataatcggccccatgttttcaggtaaaagtacagaattaattagacgagttagacgttatcaaatagctcaatataaatgcgtgactataaaatattctaacgataatagatacggaacgggactatggacgcatgataagaataattttgaagcattggaagcaactaaactatgtgatgtcttggaatcaattacagatttctccgtgataggtatcgatgaaggacagttctttccagacattgttgaattctgtgagcgtatggcaaacgaaggaaaaatagttatagtagccgcactcgatgggacatttcaacgtaaaccgtttaataatattttgaatcttattccattatctgaaatggtggtaaaactaactgctgtgtgtatgaaatgctttaaggaggcttccttttctaaacgattgggtgaggaaaccgagatagagataataggaggtaatgatatgtatcaatcggtgtgtagaaagtgttacatcgactcataatattatattttttatctaaaaaactaaaaataaacattgattaaattttaatataatacttaaaaatggatgttgtgtcgttagataaaccgtttatgtattttgaggaaattgataatgagttagattacgaaccagaaagtgcaaatgaggtcgcaaaaaaactaccgtatcaaggacagttaaaactattactaggagaattattttttcttagtaagttacagcgacacggtatattagatggtgccaccgtagtgtatataggatctgctcccggtacacatatacgttatttgagagatcatttctataatttaggagtgatcatcaaatggatgctaattgacggccgccatcatgatcctattttaaatggattgcgtgatgtgactctagtgactcggttcgttgatgaggaatatctacgatccatcaaaaaacaactgcatccttctaagattattttaatttctgatgtgagatccaaacgaggaggaaatgaacctagtacggcggatttactaagtaattacgctctacaaaatgtcatgattagtattttaaaccccgtggcatctagtcttaaatggagatgcccgtttccagatcaatggatcaaggacttttatatcccacacggtaataaaatgttacaaccttttgctccttcatattcagctgaaatgagattattaagtatttataccggtgagaacatgagactgactcgagttaccaaattagacgctgtaaattatgaaaaaaagatgtactaccttaataagatcgtccgtaacaaagtagttgttaactttgattatcctaatcaggaatatgactattttcacatgtactttatgctgaggaccgtgtactgcaataaaacatttcctactactaaagcaaaggtactatttctacaacaatctatatttcgtttcttaaatattccaacaacatcaactgaaaaagttagtcatgaaccaatacaacgtaaaatatctagcaaaaattctatgtctaaaaacagaaatagcaagagatccgtacgcggtaataaatagaaacgtactactgagatatactaccgatatagagtataatgatttagttactttaataaccgttagacataaaattgattctatgaaaactgtgtttcaggtatttaacgaatcatccataaattatactccggttgatgatgattatggagaaccaatcattataacatcgtatcttcaaaaaggtcataacaagtttcctgtaaattttctatacatagatgtggtaatatctgacttatttcctagctttgttagactagatactacagaaactaatatagttaatagtgtactacaaacaggcgatggtaaaaagactcttcgtcttcccaaaatgttagagacggaaatagttgtcaagattctctatcgccctaatataccattaaaaattgttagatttttccgcaataacatggtaactggagtagagatagccgatagatctgttatttcagtcgctgattaatcaattagtagagatgagataagaacattataataatcaataatatatcttatatcttatatcttatatcttatatcttgtttagaaaaatgctaatattaaaatagctaacgctagtaatccaatcggaagccatttgatatctataatagggtatctaatttcctgatttaaatagcggacagctatattctcggtagctactcgtttggaatcacaaacattatttacatctaatttactatctgtaatggaaacgtttcccaatgaaatggtacaatccgatacattgcattttgttatatttttttttaaagaggctggtaacaacgcatcgcttcgtttacatggctcgtaccaacaataatagggtaatcttgtatctattcctatccgtactatgcttttatcaggataaatacatttacatcgtatatcgtctttgttagcatcacagaatgcataaatttgttcgtccgtcatgataaaaatttaaagtgtaaatataactattatttttatagttgtaataaaaagggaaatttgattgtatactttcggttctttaaaagaaactgacttgataaaaatggctgtaatctctaaggttacgtatagtctatatgatcaaaaagagattaatgctacagatattatcattagtcatgttaaaaatgacgacgatatcggtaccgttaaagatggtagactaggtgctatggatggggcattatgtaagacttgtgggaaaacggaattggaatgtttcggtcactggggtaaagtaagtatttataaaactcatatagttaagcctgaatttatttcagaaattattcgtttactgaatcatatatgtattcactgcggattattgcgttcacgagaaccgtattccgacgatattaacctaaaagagttatcgggacacgctcttaggagattaaaggataaaatattatccaagaaaaagtcatgttggaacagtgaatgtatgcaaccgtatcaaaaaattactttttcaaagaaaaaggtttgtttcgtcaacaagttggatgatattaacgttcctaattctctcatctatcaaaagttaatttctattcatgaaaagttttggccattattagaaattcatcaatatccagctaacttattttatacagactactttcccatccctccgttgattattagaccggctattagtttttggatagatagtatacccaaagagaccaatgaattaacttacttattaggtatgatcgttaagaattgtaacttgaatgctgatgaacaggttatccagaaggcggtaatagaatacgatgatattaaaattatttctaataacactaccagtatcaatttatcatatattacatccggcaaaaataatatgattagaagttatatcgtcgcccgacgaaaagatcagaccgctagatctgtaattggtcccagtacatctatcaccgttaatgaggtaggaatgcccgcatatattagaaatacacttacagaaaagatatttgttaatgcctttacagtggataaagttaaacaactattagcgtcaaaccaagttaaattttactttaataaacgattaaaccaattaacaagaatacgccaaggaaagtttattaaaaataaaatacatttattgcctggtgattgggtagaagtagctgttcaagaatatacaagtattatttttggaagacagccgtctctacatagatacaacgtcatcgcttcatctatcagagctaccgaaggagatactatcaaaatatctcccggaattgccaactctcaaaatgctgatttcgacggggatgaggaatggatgatattagaacaaaatcctaaagctgtaattgaacaaagtattcttatgtatccgacgacgttactcaaacacgatattcatggagcccccgtttatggatctattcaagatgaaatcgtagcagcgtattcattgtttaggatacaagatctttgtttagatgaagtattgaacatcttggggaaatatggaagagagttcgatcctaaaggtaaatgtaaattcagcggtaaagatatctatacttacttgataggtgaaaagattaattatccgggtctcttaaaggatggtgaaattattgcaaacgacgtagatagtaattttgttgtggctatgaggcatctgtcattggctggactcttatccgatcataagtcgaacgtggaaggtatcaactttattatcaagtcatcttatgtttttaagagatatctatctatttacggttttggggtgacattcaaagatctgagaccaaattcgacgttcactaataaattggaggccatcaacgtagaaaaaatagaacttatcaaagaagcatacgccaaatatctcaacgatgtaagagacgggaaaatagttccattatctaaagctttagaggcggactatgtggaatccatgttatccaacttgacaaatcttaatatccgagagatagaagaacatatgagacaaacgctgatagatgatccagataataacctcctgaaaatggccaaagcgggttataaagtaaatcccacagaactaatgtatattctaggtacgtatggacaacaaaggattgatggtgaaccagcagagactcgagtattgggtagagttttaccttactatcttccagactctaaggatccagaaggaagaggttatattcttaattctttaacaaaaggattaacgggttctcaatattacttttcgatgctggttgcaagatctcaatctactgatatcgtctgtgaaacatcacgtaccggaacactggctagaaaaatcattaaaaagatggaggatatggtggtcgacggatacggacaagtagttataggtaatacgctcatcaagtacgccgccaattataccaaaattctaggctcagtatgtaaacctgtagatcttatctatccagatgagtccatgacttggtatttggaaattagtgctctgtggaataaaataaaacagggattcgtttactctcagaaacagaaacttgcaaagaagacattggcgccgtttaatttcctagtattcgtcaaacccaccactgaggataatgctattaaggttaaggatctgtacgatatgattcataacgtcattgatgatgtgagagagaaatacttctttacggtatctaatatagattttatggagtatatattcttgacgcatcttaatccttctagaattagaattacaaaagaaacggctatcactatctttgaaaagttctatgaaaaactcaattatactctaggtggtggaactcctattggaattatttctgcacaggtattgtctgagaagtttacacaacaagccctgtccagttttcacactactgaaaaaagtggtgccgtcaaacaaaaacttggtttcaacgagtttaataacttgactaatttgagtaagaataagaccgaaattatcactctggtatccgatgatatctctaaacttcaatctgttaagattaatttcgaatttgtatgtttgggagaattaaatccagacatcactcttcgaaaagaaacagataggtatgtagtagatataatagtcaatagattatacatcaagagagcagaaataaccgaattagtcgtcgaatatatgattgaacgatttatctcctttagcgtcattgtaaaggaatggggtatggagacattcattgaggacgaggataatattagatttactgtctacctaaatttcgttgaaccggaagaattgaatcttagtaagtttatgatggttcttccgggtgccgccaacaagggaaagattagtaaattcaagattcctatctctgactatacgggttatgacgacttcaatcaaacaaaaaagctcaataagatgactgtagaactcatgaatctaaaagaattgggttctttcgatttggaaaacgtcaacgtgtatcctggagtatggaatacatacgatatcttcggtatcgaggccgctcgtgaatacttgtgcgaagccatgttaaacacctatggagaagggttcgattatctgtatcagccttgtgatcttctcgctagtttactatgtgctagttacgaaccagaatcagtgaataaattcaagttcggcgcagctagtactcttaagagagctacgttcggagacaataaagcattgttaaacgcggctcttcataaaaagtcagaacctattaacgataatagtagctgccacttttttagcaaggtccctaatataggaactggatattacaaatactttatcgacttgggtcttctcatgagaatggaaaggaaactatctgataagatatcttctcaaaagatcaaggaaatggaagaaacagaagacttttaattcttatcaataacatatttttctatgatctgtcttttaaacgatggattttccacaaatgcgcctctcaagtccctcatagaatgatacacgtataaaaaatatagcataggcgatgactccttatttttagacattagatatgccaaaatcatagccccgcttctatttactcccgcagcacaatgaaccaacacgggctcgtttcgttgatcacatttagataaaaaggcggttacgtcgtcaaaatatttactaatatcggtagttgtatcatctaccaacggtatatgaataatattaatattagagttaggtaatgtatatttatccatcgtcaaatttaaaacatatttgaacttaacttcagatgatggtgcatccatagcatttttataatttcccaaatacacattattggttacccttgtcattatagtgggagatttggctctgtgcatatctccagttgaacgtagtagtaagtatttatacaaacttttcttatccatttataacgtacaaatggataaaactactttatcggtaaacgcgtgtaatttagaatacgttagagaaaaggctatagtaggcgtacaagcagccaaaacatcaacacttatattctttgttattatattggcaattagtgcgctattactctggtttcagacgtctgataatccagtctttaatgaattaacgagatatatgcgaattaaaaatacggttaacgattggaaatcattaacggatagcaaaacaaaattagaaagtgatagaggtagacttctagccgctggtaaggatgatatattcgacttcaaatgtgtggatttcggcgcctattttatagctatgcgattggataagaaaacatatctgccgcaagctattaggcgaggtactggagacgcgtggatggttaaaaaggcggcaaaggtcgatccatctgctcaacaattttgtcagtatttgataaaacacaagtctaataatgttattacttgtggtaatgagatgttaaatgaattaggttatagcggttattttatgtcaccgcattggtgttccgattttagtaatatggaatagtgttagataaatgcggtaacgaatgttcctgtaaggaaccataacagcttagatttaacgttaaagatgagcataaacataataaacaaaattacaatcaaacctataacattaatatcaaacaatccaaaaaatgaaatcagtggagtagtaaacgcgtacataactcctggataacgtttagcagctgccgttcctattctagaccaaaaattcggtttcatgttttcgaaacggtattctgcaacaagtcgaggatcgtgttctacatatttggcggcgttatccagtatctgcctattgatcttcatttcgttttcgattctggctatttcaaaataaaatcccgatgatagacctccagactttataatttcatctacgatgttcagcgccgtagtaactctaataatataggctgataagctaacatcataccctcctgtatatgtgaatatggcatgatttttgtccattacaagctcggttttaactttattgcctgtaataatttctctcatctgtaggatatctatttttttgtcatgcattgccttcaagacgggacgaagaaacgtaatatcctcaataacgttatcgttttctacaataactacatattctacctttttattttctaactcggtaaaaaaattagaatcccatagggctaaatgtctagcgatatttcttttcgtttcttctgtacacatagtgttacaaaaccctgaaaagaagtgagtatacttgtcatcatttctaatgtttcctccagtccactgtataaacgcataatccttgtaatgatctggatcatccttgactaccacaacatttcttttttctggcataacttcgttgtcctttacatcatcgaacttctgatcattaatatgctcatgaacattaggaaatgtttctgatggaggtctatcaataactggcacaacaataacaggagttttcaccgccgccatttagttattgaaattaatcatatacaactctttaatacgagttatattttcgtctatccattgtttcacattgacatatttcgacaaaaagatataaaatgcgtattccaatgcttctctgtttaatgaattactaaaatatacaaacacgtcactgtctggcaataaatgatatcttagaatattgtaacaatttattttgtattgcacatgttcgtgatctatgagttcttcttcgaatggcataggatctccgaatctgaaaacgtataaataggagttagaataataatatttgagagtattggtaatatataaactctttagcggtataattagtttttttctctcaatttctatttttagatgtgatggaaaaatgactaattttgtagcattagtatcatgaactctaatcaaaatcttaatatcttcgtcacacgttagctctttgaagtttttaagagatgcatcagttggttctacagatggagtaggtgcaacaattttttgttctacacatgtatgtactggagccattgttttaactataatggtgcttgtatcgaaaaactttaatgcagatagcggaagctcttcgccgcgactttctacgtcgtaattgggttctaacgccgatctctgaatggatactagttttctaagttctaatgtgattctctgaaaatgtaaatccaattcctccggcattatagatgtgtatacatcggtaaataaaactatagtatccaacgatcccttctcgcaaattctagtcttaaccaaaaaatcgtatataaccacggagatggcgtatttaagagtggattcttctaccgttttgttcttggatgtcatataggaaactataaagtccgcactactgttaagaatgattactaacgcaactatatagtttaaattaagcattttggaaacataaaataactctgtagacgatacttgactttcgaataagtttgcagacaaacgaagaaagaacagacctctcttaatttcagaagaaaactttttttcgtattcctgacgtctagagtttatatcaataagaaagttaagaattagtcggttaatgttgtatttcattacccaagtttgagatttcataatattatcaaaagacatgataatattaaagataaagcgctgactatgaacgaaatagctatatggttcgctcaagaatatagtcttgttaaacgtggaaacgataactgtatttttaatcacgtcagcggcatctaaattaaatataggtatatttattccacacactctacaatatgccacaccatcttcataataaataaattcgttagcaaaattattaattttagtgaaatagttagcgtcaactttcatagcttccttcaatctaatttgatgctcacacggtgcgaattccactctaacatcccttttccatgcctcaggttcatcgatctctataatatctagttttttgcgtttcacaaacacaggctcgtctctcgcgatgagatctgtatagtaactatgtaaatgataactagatagaaagatgtagctatatagatgacgatcctttaagagaggtataataactttaccccaatcagatagactgttgttatggtcttcggaaaaagaatttttataaatttttccagtattttccaaatatacgtacttaacatctaaaaaatccttaatgataataggaatggataatccgtctattttataaagaaatacatatcgcacattatacttttttttggaaatgggaataccgatgtgtctacataaatatgcaaagtctaaatattttttagagaatcttagttggtccaaattcttttccaagtacggtaatagatttttcatattgaacggtatcttcttaatctctggttctagttccgcattaaatgatgaaactaagtcactatttttataactaacgattacatcacctctaacatcatcatttaccagaatactgatcttcttttgtcgtaaatacatgtctaatgtgttaaaaaaaagatcatacaagttatacgtcatttcatctgtggtattcttgtcattgaaggataaactcgtactaatctcttctttaacagcctgttcaaatttatatcctatatacgaaaaaatagcaaccagtgtttgatcatccgcgtcaatattctgttctatcgtagtgtataacaatcgtatatcttcttctgtgatagtcgatacgttataaaggttgataacgaaaatatttttatttcgtgaaataaagtcatcgtaggattttggacttatattcgcgtctagtagatatgcttttatttttggaatgatctcaattagaatagtctctttagagtccatttaaagttacaaacaactaggaaattggtttatgatgtataatttttttagtttttatagattctttattctatacttaaaaaatgaaaataaatacaaaggttcttgagggttgtgttaaattgaaagcgagaaataatcataaattatttcattatcgcgatatccgttaagtttgtatcgtaatggcgtggtcaattacgaataaagcggatactagtagcttcacaaagatggctgaaatcagagctcatctaaaaaatagcgctgaaaataaagataaaaacgaggatattttcccggaagatgtaataattccatctactaagcccaaaaccaaacgagccactactcctcgtaaaccagcggctactaaaagatcaaccaaaaaggaggaagtggaagaagaagtagttatagaggaatatcatcaaacaactgaaaaaaattctccatctcctggagtcagcgacattgtagaaagcgtggccgctgtagagctcgatgatagcgacggggatgatgaacctatggtacaagttgaagctggtaaagtaaatcatagtgctagaagcgatctctctgacctaaaggtggctaccgacaatatcgttaaagatcttaagaaaattattactagaatctctgcagtatcgacggttctagaggatgttcaagcagctggtatctctagacaatttacttctatgactaaagctattacaacactatctgatctagtcaccgagggaaaatctaaagttgttcgtaaaaaagttaaaacttgtaagaagtaaatgcgtgcacttttttataaagatggtaaactctttaccgataataattttttaaatcctgtatcagacgataatccagcgtatgaggttttgcaacatgttaaaattcctactcatttaacagatgtagtagtatatgaacaaacgtgggaggaggcgttaactagattaatttttgtgggaagcgattcaaaaggacgtagacaatacttttacggaaaaatgcatgtacagaatcgcaacgctaaaagagatcgtatttttgttagagtatataacgttatgaaacgaattaattgttttataaacaaaaatataaagaaatcgtccacagattccaattatcagttggcggtttttatgttaatggaaactatgttttttattagatttggtaaaatgaaatatcttaaggagaatgaaacagtagggttattaacactaaaaaataaacacatagaaataagtcccgatgaaatagttatcaagtttgtaggaaaggacaaagtttcacatgaatttgttgttcataagtctaatagactatataaaccgctattgaaactgacggatgattctagtcccgaagaatttctgttcaacaaactaagtgaacgaaaggtatacgaatgtatcaaacagtttggtattagaatcaaggatctccgaacgtatggagtcaattatacgtttttatataatttttggacaaatgtaaagtccatatctcctcttccgtcaccaaaaaagttaatagcgttaactatcaaacaaactgctgaagtggtaggtcatactccatcaatttcaaaaagagcttatatggcaacgactattttagaaatggtaaaggataaaaattttttagatgtagtatctaaaactacgttcgatgaattcctatctatagtcgtagatcacgttaaatcatctacggatggatgatatagatctttacacaaataattacaagaccgataaatggaaatggataagcgtataaaatctctcgcaatgaccgctttctttggggagctaagcacattagatattatggcattgataatgtctatatttaaacgccatccaaacaataccattttttcagtggataaggatggtcagtttatgattgatttcgaatacgataattataaggcttctcaatatttggatctgaccctcactccgatatttggagatgaatgcaagactcacgcatcgagtatagccgaacaattggcgtgtgcggatattattaaagaggatattagcgaatacatcaaaactactccccgtcttaaacgatttataaaaaaataccgcaatagatcagatactcgtatcagtcgagatacagaaaagcttaaaatagctctagctaaaggcatagattacgaatatataaaagacgcttgttaataagtaaatgaaaaaaaactagtcgtttataataaaacacgatatggatgccaacgtagtatcatcttctactattgcgacgtatatagacgctttagcgaagaatgcttcagaattagaacagaggtctaccgcatacgaaataaataatgaattggaactagtatttattaagccgccattgattactttgacaaatgtagtgaatatctctacgattcaggaatcgtttattcgatttaccgttactaataaggaaggtgttaaaattagaactaagattccattatctaaggtacatggtctagatgtaaaaaatgtacagttagtagatgctatagataacatagtttgggaaaagaaatcattagtgacggaaaatcgtcttcacaaagaatgcttgttgagactatcgacagaggaacgtcatatatttttggattacaagaaatatggatcctctatccgactagaattagtcaatcttattcaagcaaaaacaaaaaactttacgatagactttaagctaaaatattttctaggatccggtgcccaatctaaaagttctttgttgcacgctattaatcatccaaagtcaaggcctaatacatctctggaaatagaattcacacctagagacaatgaaacagttccatatgatgaactaataaaggaattgacgactctctcgcgtcatatatttatggcttctccagagaatgtaattctttctccgcctattaacgcgcctataaaaacctttatgttgcctaaacaagatatagtaggtttggatctggaaaatctatatgccgtaactaagactgacggcattcctataactatcagagttacatcaaacgggttgtattgttattttacacatcttggttatattattagatatcctgttaagagaataatagattccgaagtagtagtctttggtgaggcagttaaggataagaactggaccgtatatctcattaagctaatagagcccgtgaatgctatcagtgatagactagaagaaagtaagtatgttgaatctaaactagtggatatttgtgatcggatagtattcaagtcaaagaaatacgaaggtccgtttactacaactagtgaagtcgtcgatatgttatctacatatttaccaaagcaaccagaaggtgttattctgttctattcaaagggacctaaatctaacattgattttaaaattaaaaaggaaaatactatagaccaaactgcaaatgtagtatttaggtacatgtccagtgaaccaattatctttggagaatcgtctatctttgtagagtataagaaatttagcaacgataaaggctttcctaaagaatatggttctggtaagattgtgttatataacggcgttaattatctaaataatatctattgtttggaatatattaatacacataatgaagtgggtattaagtccgtggttgtacctattaagtttatagcagaattcttagttaatggagaaatacttaaacctagaattgataaaaccatgaaatatattaactcagaagattattatggaaatcaacataatatcatagtcgaacatttaagagatcaaagcatcaaaataggagatatctttaacgaggataaactatcggatgtgggacatcaatacgccaataatgataaatttagattaaatccagaagttagttattttacgaataaacgaactagaggaccgttgggaattttatcaaactacgtcaagactcttcttatttctatgtattgttccaaaacatttttagacgattccaacaaacgaaaggtattggcgattgattttggaaacggtgctgacctggaaaaatacttttatggagagattgcgttattggtagcgacggatccggatgctgatgctatagctagaggaaatgaaagatacaacaaattaaactctggaattaaaaccaagtactacaaatttgactacattcaggaaactattcgatccgatacatttgtctctagtgtcagagaagtattctattttggaaagtttaatatcatcgactggcagtttgctatccattattcttttcatccgagacattatgctaccgtcatgaataacttatccgaactaactgcttctggaggcaaggtattaatcactaccatggacggagacaaattatcaaaattaacagataaaaagacttttataattcataagaatttacctagtagcgaaaactatatgtctgtagaaaaaatagctgatgatagaatagtggtatataatccatcaacaatgtctactccaatgactgaatacattatcaaaaagaacgatatagtcagagtgtttaacgaatacggatttgttcttgtagataacgttgatttcgctacaattatagaacgaagtaaaaagtttattaatggcgcatctacaatggaagatagaccgtctacaaaaaactttttcgaactaaatagaggagccattaaatgtgaaggtttagatgtcgaagacttacttagttactatgttgtttatgtcttttctaagcggtaaataataatatggtatgggttctgatatccccgttctaaatgcattaaataattccaatagagcgatttttgttcctataggaccttccaactgtggatactctgtattgttaatagatatattaatacttttgtcgggtaacagaggttctacgtcttctaaaaataaaagttttataacatctggcctgttcataaataaaaacttggcgattctatatatactcttattatcaaatctagccattgtcttatagatgtgagctactgtaggtgtaccatttgattttctttctaatactatatatttctctcgaagaagttcttgcacatcatctgggaataaaatactactgttgagtaaatcagttattttttttatatcgatattgatggacatttttatagttaaggataataagtatcccaaagtcgataacgacgataacgaagtatttatacttttaggaaatcacaatgactttatcagattaaaattaacaaaattaaaggagcatgtatttttttctgaatatattgtgactccagatacatatggatctttatgcgtcgaattaaatgggtctagttttcagcacggtggtagatatatagaggtggaggaatttatagatgctggaagacaagttagatggtgttctacatccaatcatatatctaaagatatacccgaagatatgcacactgataaatttgtcatttatgatatatacacttttgacgctttcaagaataaacgattggtattcgtacaggtacctccgtcgttaggagatgatagtcatttgactaatccgttattgtcaccgtattatcgtaattcagtagccagacaactggtcaataatatgatttttaatcaagattcatttttaaaatatttattagaacatctgattagaagccactatagagtttctaaacatataacaatagttagatacaaggataccgaagaattaaatctaacgagaatatgttataatagagataagtttaaggcgtttgtattcgcttggtttaacggcgtttcggaaaatgaaaaggtactagatacgtataaaaaggtatctaatttgatataatgaattcagtgactgtatcacacgcgccatatactattacttatcacgatgattgggaaccagtaatgagtcaattggtagagttttataacgaagtagctagttggctgctacgagacgagacgtcgcctattcctgataagttctttatacagttgaaacaaccgcttagaaataaacgagtatgtgtgtgcggtatagatccgtatccgaaagatggaactggtgtaccgttcgaatcaccaaattttacaaaaaaatcaattaaggagatagcttcatctatatctagattaaccggagtaattgattataaaggttataaccttaatataatagacggggttataccctggaattattacttaagttgtaaattaggagaaacaaaaagtcacgcgatctactgggataaaatttctaagttactgctgcagcatataactaaacacgttagtgttctttattgtttgggtaaaacagatttctcgaatatacgggccaagttagaatccccggtaactaccatagtcggatatcatccagcggctagagaccgccaattcgagaaagatagatcatttgaaattatcaacgttttactggaattagacaacaaggcacctataaattgggctcaagggtttatttattaatgctttagtgaaattttaacttgtgttctaaatggatgcggctattagaggtaatgatgttatctttgttcttaagactataggtgtcccgtcagcgtgcagacaaaatgaagatccaagatttgtagaagcatttaaatgcgacgagttagaaagatatattgagaataatccagaatgtacactattcgaaagtcttagggatgaggaagcatactctatagtcagaattttcatggatgtagatttagacgcgtgtctagacgaaatagattatttaacggccattcaagattttattatcgaggtgtcaaactgtgtagctagattcgcgtttacagaatgcggcgccattcatgaaaatgtaataaaatccatgagatctaatttttcattgactaagtctacaaatagagataaaacaagttttcatattatctttttagatacgtataccactatggatacattgatagctatgaaacgaacactattagaattaagtagatcatctgaaaatccactaaccagatcgatagacactgccgtatataggagaaaaacaactcttcgggttgtaggtactaggaaaaatccaaattgcgacactattcatgtaatgcaaccaccgcatgataatatagaagattacctattcacttacgtggatatgaacaacaatagttattacttttctctacaacaacgattggaggatttagttcctgataagttatgggaaccagggtttatttcattcgaagacgctataaaaagagtttcaaaaatattcattaattctataataaactttaatgatctcgatgaaaataattttacaacggtaccactggtcatagattacgtaacaccttgtgcattatgtaaaaaacgatcgcataaacatccgcatcaactatcgttggaaaatggtgctattagaatttacaaaactggtaatccacatagttgtaaagttaaaattgttccgttggatggtaataaactgtttaatattgcacaaagaattttagacactaactctgttttattaaccgaacgaggagaccatatagtttggattaataattcatggaaatttaacagcgaagaacccttgataacaaaactaattttgtcaataagacatcaactacctaaggaatattcaagcgaattactctgtccgaggaaacgaaagactgtagaagctaacatacgagacatgttagtagattcagtagagaccgatacctatccggataaacttccgtttaaaaatggtgtattggacctggtagacggaatgttttactctggagatgatgctaaaaaatatacgtgtactgtatcaaccggatttaaatttgacgatacaaagttcgtcgaagacagtccagaaatggaagagttaatgaatatcattaacgatatccaaccattaacggatgaaaataagaaaaatagagagctatatgaaaaaacattatctagttgtttatgcggtgctaccaaaggatgtttaacattcttttttggagaaactgcaactggaaagtcgacaaccaaacgtttgttaaagtctgctatcggtgacctgtttgttgagacgggtcaaacaattttaacagatgtattggataaaggacctaatccatttatcgctaacatgcatttgaaaagatctgtattctgtagcgaactacctgattttgcatgtagtgggtcaaagaaaatcagatctgataatattaaaaagttgacagaaccttgtgtcattggaagaccgtgtttctccaataaaattaataatagaaaccatgcgacaatcattatcgatactaattacaaacctgtttttgataggatagataacgcattaatgagaagaattgccgtcgtgcgattcagaacacacttttctcaaccttctggtagagaggctgctgaaaataatgacgcgtacgataaagtcaaactattagacgaggggttagatggtaaaatacaaaataatagatatagatttgcatttctatacttgttggtgaaatggtacagaaaatatcatgttcctattatgaaactatatcctacaccggaagagattcctgactttgcattctatctcaaaataggtactctgttagtatctagctctgtaaagcatattccattaatgacggacctctccaaaaagggatatatattgtacgataatgtggtcactcttccgttgactactttccaacagaaaatatccaagtattttaattctagactatttggacacgatatagagagcttcatcaatagacataagaaatttgccaatgttagtgatgaatatctgcaatatatattcatagaggatatttcatctccgtaaatatatgctcatatatttatagaagatatcacatatctaaatgaataccggaatcatagatttatttgataatcatgttgatagtataccaactatattacctcatcagttagctactctagattatctagttagaactatcatagatgagaacagaagcgtgttattgttccatattatgggatcaggtaaaacaataatcgctttgttgttcgccttggtagcttccagatttaaaaaggtttacattctagtgccgaacatcaacatcttaaaaattttcaattataatatgggtgtagctatgaacttgtttaatgacaaattcatagctgagaatatctttattcattccacaacaagtttttattctcttaattataacgataacgtcattaattataacggattatctcgctacaataactctatttttatcgttgatgaggcacataatatctttgggaataatactggagaacttatgaccgtgataaaaaataaaaacaagattccttttttactattgtctggatctcccattactaacacacctaatactctgggtcatattatagatttaatgtccgaagagacgatagattttggtgaaattattagtcgtggtaagaaagtaattcagacacttcttaacgaacgcggtgtgaatgtacttaaggatttgcttaaaggaagaatatcatattacgaaatgcctgataaagatctaccaacgataagatatcacggacgtaagtttctagatactagagtagtatattgtcacatgtctaaacttcaagagagagattatatgattactagacgacagctatgttatcatgaaatgtttgataaaaatatgtataacgtgtcaatggcagtattgggacaacttaatctgatgaataatttagatactttatttcaggaacaggataaggaattgtacccaaatctgaaaataaataatggcgtgttatacggagaagaattggtaacgttaaacattagttccaaatttaaatactttattaatcggatacagacactcaacggaaaacattttatatacttttctaattctacatatggcggattggtaattaaatatatcatgctcagtaatggatattctgaatataatggttctcagggaactaatccacatatgataaacggcaaaccaaaaacatttgctatcgttactagtaaaatgaaatcgtctttagaggatctattagatgtgtataattctcctgaaaacgatgatggtagtcaattgatgtttttgttttcgtcaaacattatgtccgaatcctatactctgaaagaggtaaggcatatttggtttatgactatcccagatactttttctcaatacaaccaaattcttggacgatctattagaaaattctcttacgccgatatttctgaaccagttaatgtatatcttttagccgccgtatattccgatttcaatgacgaagtgacgtcattaaacgattacacacaggatgaattaattaatgttttaccatttgacatcaaaaagctgttatatctaaaatttaagacgaaagaaacgaatagaatatactctattcttcaagagatgtctgaaacgtattctcttccaccacatccatcaattgtaaaagttttattgggagaattggtcagacaatttttttataataattctcgtattaagtataacgataccaagttacttaaaatggttacatcagttataaaaaataaagaagacgctaggaattacatagatgatattgtaaacggtcacttctttgtatcgaataaagtatttgataaatctcttttatacaaatacgaaaacgatattattacagtaccgtttagactttcctacgaaccatttgtttggggagttaactttcgtaaagaatataacgtggtatcttctccataaaactgatgagatatataaagaaataaatgtcgagctttgttaccaatggatacctttccgttacattggaacctcatgagctgacgttagacataaaaactaatattaggaatgccgtatataagacgtatctccatagagaaattagtggtaaaatggccaagaaaatagaaattcgtgaagacgtggaattacctctcggcgaaatagttaataattctgtagttataaacgttccgtgtgtaataacctacgcgtattatcacgttggggatatagtcagaggaacattaaacatcgaagatgaatcaaatgtaactattcaatgtggagatttaatctgtaaactaagtagagattcgggtactgtatcatttagcgattcaaagtactgcttttttcgaaatggtaatgcgtatgacaatggcagcgaagtcactgccgttctaatggaggctcaacaaggtatcgaatctagttttgtttttctcgcgaatatcgtcgactcataagaaagagaatagcggtaagtataaacacgaatactatggcaataattgcgaatgttttattctcttcgatatatttttgataatatgaaaaacatgtctctctcaaatcggacaaccatctcataaaatagttctcgcgcgctggagaggtagttgccgctcgtataatctccccagaataatatacttgcgtgtcgtcgttcaatttatacggatttctatagttctctgttatataatgcggttttccatcatgattagacgacgacaatagtgttctaaatttagatagttgatcagaatgaatgtttattggcgttggaaaaattatccatacagcgtctgcagagtggttgatagttgttcctagatatgtaaaataatccaacttactaggcagcaaattgtctagataaaatactgaatcaaacggtgcagacgtattggcggatctaatggaatccaattgattaactatcttttgaaaatatacatttttatgatccaatacttgtaagaatatagaaataatgataagtccatcatcgtgtttttttgcctcttcataagaactatattttttcttattccaatgaacaagattaatctctccagagtatttgtacacatctatcaagtgattggatccataatcgtcttcctttccccaatatatatgtagtgatgataacacatattcattggggagaaaccctccacttatatatcctcctttaaaattaatccttactagttttccagtgttctggatagtggttggtttcgactcattataatgtatgtctaacggcttcaatcgcgcgttagaaattgcttttttagtttctatattaataggagatagttgttgcggcatagtaaaaatgaaatgataactgtttaaaaatagctcttagtatgggaattacaatggatgaggaagtgatatttgaaactcctagagaattaatatctattaaacgaataaaagatattccaagatcaaaagacacgcatgtgtttgctgcgtgtataacaagtgacggatatccgttaataggagctagaagaacttcattcgcgttccaggcgatattatctcaacaaaattcagattctatctttagagtatccactaaactattacggtttatgtactacaatgaactaagagaaatctttagacggttgagaaaaggttctatcaacaatatcgatcctcactttgaagagttaatattattgggtggtaaactagataaaaaggaatctattaaagattgtttaagaagagaattaaaagaggaaagtgatgaacgtataacagtaaaagaatttggaaatgtaattctaaaacttacaacacgggataaattatttaataaagtatatataagttattgcatggcgtgttttattaatcaatcgttggaggatttatcgcatactagtatttacaatgtagaaattagaaagattaaatcattaaatgattgtattaacgacgataaatacgaatatctgtcttatatttataatatgctagttaatagtaaatgaacttttacagatctagtataattagtcagattattaagtataatagacgactagctaagtctattatttgcgaggatgactctcaaattattacactcacggcattcgttaaccaatgcctatggtgtcataaacgagtatccgtgtccgctattttattaactactgataacaaaatattagtatgtaacagacgagatagttttctctattctgaaataattagaactagaaacatgtttagaaagaaacgattatttctgaattattccaattatttgaacaaacaggaaagaagtatactatcgtcatttttttctctagatccagctactactgataatgatagaatagacgctatttatccgggtggcatacccaaaaggggtgagaatgttccagagtgtttatccagggaaattaaagaagaagttaatatagacaattcttttgtattcatagacactcggttttttattcatggcatcatagaagataccattattaataaattttttgaggtaatcttctttgtcggaagaatatctctaacgagtgatcaaatcattgatacatttaaaagtaatcatgaaatcaaggatctaatatttttagatccgaattcaggtaatggactccaatacgaaattgcaaaatatgctctagatactgcaaaacttaaatgttacggccatagaggatgttattacgaatcattaaaaaaattaactgaggatgattgattagaaaatataaattaatttaccatcgtgtatttttataacgggattgtccggcatatcatgtagatagttaccgtctacatcgtatactcgaccatctacgcctttaaatcctctatttattgacattaatctattagaattggaataccaaatattagtaccctcaattagtttattggtaatattttttttagacgatagatcgatggctcttgaaaccaaggttttccaaccggactcattgtcgatcggtgagaagtctttttcattagcatgaatccattctaatgatgtatgtttaaacactctaaacaattggacaaattcttttgatttgctttgaatgatttcaaataggtcttcgtctacagtaggcataccattagataatctagccattataaagtgcacgtttacatatctacgttctggaggagtaagaacgtgactattgagacgaatggctcttcctactatctgacgaagagacgcctcgttccatgtcatatctaaaatgaagatatcattaattgagaaaaaactaataccctcgcctccactagaagagaatacgcatgttttaatgcattctccgttagtgtttgattcttggttaaactcagccaccgccttgattctagtatcttttgttctagatgagaactctatattagagataccaaagactttgaaatatagtaataagatttctattcctgactgattaacaaatggttcaaagactagacatttaccatgggatgctaatattcccaaacatacatctataaatttgacgcttttctcttttaattcagtaaatagagagatatcagccgcactagcatcccctttcaatagttctccctttttaaaggtatctaatgcggatttagaaaactctctatctcttaatgaatttttaaaatcattatatagtgttgctatctcttgcgcgtattcgcccggatcacgattttgtctttcaggaaagctatcgaacgtaaacgtagtagccatacgtctcagaattctaaatgatgatatacctgtttttatttcagcgagtttagccttttgataaatttcttcttgctttttcgacatattaacgtatcgcattaatactgttttcttagcgaatgatgcagacccttctacgtcatcaaaaatagaaaactcgttattaactatatacgaacatagtcctcctagtttggagactaattctttttcatcgactagacgtttattctcaaatagtgattggtgttgtaaggatcctggtcgtagtaagttaaccaacatggtgaattcttgcacactattgacgataggtgtagccgataaacaaatcatcttatggttttttaacgcaatggtcttagataaaaaattatatactgaacgagtaggacggatcttaccatcttctttgattaatgatttagaaatgaagttatgacattcatcaatgatgacgcatattctactcttggaattaatagttttgatattagtaaaaaatttatttctaaaattttgatcatcgtaattaataaaaatacaatccttcgttatctctggagcgtatctgagtatagtgttcatccaaggatcttctatcaaagcctttttcaccaataagataatagcccaattcgtataaatatccttaagatgtttgagaatatatacagtagtcattgttttaccgacacccgtttcatggaacaataaaagagaatgcatactgtctaatcctaagaaaactcttgctacaaaatgttgataatccttgaggcgtactacgtccgaccccatcatttcaacgggcatattagtagttctgcgtaaggcataatcgatataggccgcgtgtgatttactcatttatgagtgataagtaataactatgttttaaaaatcacagcagtagtttaactagtcttctctgatgtttgttttcgatactttttgaatcagaagtcatactagaataaagcaacgagtgaacgtaatagagagcttcgtatactctattcgaaaactctaagaacttattaatgaattccgtatccactggattgtttaaaatactaaattgaacactgttcacatccttccaagaagaagacttagtgacggacttaacatgagacataaataaatccaaattttttttacaaacatcactagccaccataatggcgctatctttcaaccagctatcgcttacgcattttagcagtctaacatttttaaagagactacaatatattctcatagtatcgattacacctctaccgaataaagttggaagtttaataatacaatatttttcgtttacaaaatcaaataatggtcgaaacacgtcgaaggttaacatcttataatcgctaatgtatagattgttttcagtgagatgattattagatttaatagcatctcgttcacgtttgaacagtttattgcgtgcgctgaggtcggcaactacggcgtccgctttagtactcctcccataatactttacgctattaatctttaaaatttcatagactttatctagatcgctttctggtaacatgatatcatgtgtaaaaagttttaacatgtcggtcggcattctatttagatcattaactctagaaatctgaagaaagtaattagctccgtattccagactaggtaatgggcttttacctagagacagattaagttctggcaatgtttcataaaatggaagaaggacatgcgttccctcccggatattttttacaatttcatccatttacaactctatagtttgttttcattattattagttattatctcccataatcttggtaatacttaccccttgatcgtaagataccttatacaggtcattacatacaactaccaattgtttttgtacataatagattggatggttgacatccatggtggaataaactactcgaacagatagtttatctttccccctagatacattagccgtaatagttgtcggcctaaagaatatctttggtgtaaagttaaaagttagggttcttgttccattattgctttttgtcagtagttcattataaattctcgagatgggtccgttctctgaatatagaacatcatttccaaatctaacttctagtctagaaataatatcggtcttattcttaaaatctattcccttgatgaagggatcgttaatgaacaaatccttggcctttgattcggctgatctattatctccgttatagacgttacgttgactagtccaaagacttacaggaatagatgtatcgatgatgttgatactatgtgatatgtgagcaaagattgttctcttagtggcatcactatatgttccagtaatggcggaaaactttttagaaatgttatatataaaagaattttttcgtgttccaaacattagcagattagtatgaagataaacactcatattatcaggaacattatcaatttttacatacacatcagcatcttgaatagaaacgataccatcttctggaacctctacgatctcggcagactccggataaccagtcggtgggccatcgctaacaataactagatcatccaacaatctactcacatatgcatctatataatctttttcatcttgtgagtaccctggatacgaaataaatttattatccgtatttccataataaggtttagtataaacagagagagatgttgccgcatgaacttcagttacagtcgccgttggttggtttatttgacctattactctcctaggtttctctataaacgatggtttaatttgtacattcttaaccatatatccaataaagctcaattcaggaacataaacaaattctttgttgaacgtttcaaagtcgaacgaagagtcacgaataacgatatcggatactggattgaaggttaccgttacggtaatttttgaatcggatagtttaagactgctgaatgtatcttccacatcaaacggagttttaatataaacgtatactgtagatggttctttaatagtgtcattaggagttaggccaatagaaatatcattaagttcactagaatatccagagtgtttcaaagcaattgtattattgatacaattattatataattcttcgccctcaatttcccaaataacaccgttacacgaagagatagatacgtgattaatacatttatatccaacatatggtacgtaactgaatcttcccatacctttaacttctggaagttccaaactcagaaccaaatgattaagcgcagtaatatactgatccctaatttcgaagctagcgatagcctgattgtctggaccatcgtttgtcataactccggatagagaaatatattgcggcatatataaagttggaatttgactatcgactgcgaagacattagaccgtttaatagagtcatccccaccgatcaaagaattaatgatagtattattcattttctatttaaaatggaaaaagcttacaataaactccgtagagaaatatctataatttgtgagttttccttaaagtaacagcttccgtaaacgccgtctttatctcttagtaggtttattgtatttatgaccttttccttatcttcatagaatactaaaggcaacaaagaaatttttggttcttctctaagagctacgtgagacttaaccatagaagccaacgaatccctacatattttagaacagaaataccctacttcaccacccttgtatgtctcaatactaataggtctaaaaaccaaatcttgattacaaaaccaacacttatcaattacactatttgtcttaatagacacatctgccatagatttataatactttggtagtatacaagcgagtgcttcttctttagcgggcttaaagactgctttaggtgctgaaataaccacatctggaaggcttactcgcttagccatttaattacggaactatttttttatacttctaatgagcaagtagaaaacctctcatctacaaaaacgtactcgtgtccataatcctctaccatagttacacgttttttagatctcatatgtgctaaaaagttttcccatactaattggttactattatttttcgtataatttttaacagtttgaggttttagatttttagttacagaagtgatatcgaatattttatccaaaaagaatgaataattaattgtcttagaaggagtgttttcttggcaaaagaataccaagtgcttaaatatttctactacttcattaatcttttctgtactcagattcagtttctcatcttttacttgattgattatttcaaagactaacttataatcctttttatttattctctcgttagccttaagaaaactagatacaaaatttgcatctacatcatccgtggatatttgatttttttccatgatatccaagagttccgagataatttctccagaacattgatgagacaataatctccgcaatacatttctcaaatgaataagtttattagacacgtggaagtttgactttttttgtacctttgtacatttttgaaatacagactcgcaaaaaatacaatattcatatccttgttcagatactataccgttatgtctacaaccgctacataatcgtagattcatgttaacactctacgtatctcgtcgtccaatattttatataaaaacattttatttctagacgttgccagaaaatcctgtaatatttttagttttttgggctgtgaataaagtatcgccctaatatggttaccgtcctccgccaatatagtagttaaattatccgcacatgcagaagaacaccgcttaggcggattcagtacaatgttatatttttcgtaccaactcatttaaatatcataatctaaaatagttctgtaatatgtctagcgctaatatattgatcataatcctgtgcataaattaagatacaacaatgtctcgaaatcatcgacatggcttcttccatagttagaagatcgtcgtcaaagttagcaacgtgattcatcaacatttgctgttttgaggcagcaaatactgaaccgtcgccattcaaccattcataaaaaccatcgtctgaatccattgataatttcttgtactggtttttgagagctcgcatcaatctagcatttctagctcccggattgaaaacagaaagaggatcgtacatccagggtccattttctgtaaatagaatcgtataatgtcccttcaagaagatatcagacgatccacaatcaaagaattggtctccgagtttgtaacaaactgcggactttaacctatacatgataccgtttagcataatttctggtgatacgtcaatcggagtatcatctattagagatctaaagccggtgtaacattctccaccaaacatattcttattctgacgtcgttctacataaaacatcattgctccattaacgataacaggggaatgaacagcactacccatcacattagttcccaatggatcaatgtgtgtaactccagaacatcttccatagcctatgttaggaggagcgaacaccactcttccactattgccatcgaatgccatagaataaatatccttggaattgatagaaatcggactgtcggatgttgtgatcatcttcataggattaacaactatgtatggtgccgcctgaagtttcatatcgtaactgatgccgtttataggtctagccacagaaaccaacgtaggtctaaatccaactatagacaaaatagaagccaatatctgttcctcatctgtcataacttgagagcatccagtatgaataatcttcattagatggggatctaccgcatcatcatcgttacaataaaaaattcccattctaatgttcataattgcttttctaatcatggtatgcatgtttgctctctgaatctctgtggaaattagatctgatacacctgtaatcactatcggattatcctccgtaagacgattaaccaacaacatataattataagactttacttttctaaattcataaagttgctggattaggctataggtgtctccatgtacatacgcgttctcgagcgcaggaagtttaataccgaatagtgccatcagaataggatgaatatagtaattagtttctggttttctataaataaaagacaaatcttgtgaactagacatatcggtaaaatgcatggattggaatcgtgtagtcgacagaagaatatgatgattagatggagagtatattttatctaactctttgagttggtcaccgattctaggactagctcgagaatgaataagtactaaaggatgagtacatttcacagaaacactagcattgttcaatgtgctctttacatgggtaaggagttgaaatagctcgtttctatttgttctgacaatatttagtttattcataatgttaagcatatcctgaatagtaaagttagatgtgtcatacttgttagtagttagatatttagcaattgcattcccatcatttctcaatctcgtactccaatcatgtgtagatgctacttcgtcgatggaaaccatacaatcctttttgataggctgttgagattgatcatttcctgcacgtttaggtttggtacgttgatttctagcccctgcggatataaagtcatcgtctacaatttgggacaatgaattgcatacactacaagacaaagatttatcagaagtgtgaatatgatcttcatctaccaaagaaagagtttgattagtataactagattttagtcctgcgttagatgttaaaaaaacatcgctattgaccacggcttccattatttatattcgtagtttttactcgaaagcgtgattttaatatccaatcttattacttttggaatcgttcaaaacctttgactagttgtagaatttgatctattgccctacgcgtatactcccttgcatcatatacgttcgtcaccagatcgtttgtttcggcctgaagttggtgcatatctctttcaacattcgacatgagatccttaagggccatatcgtctagattttgttgagatgctgctcctggatttggattttgttgtgctgttgtacatactgtaccaccagtaggtgtaggagtacatacagtggccacaataggaggttgagaaagtgtaaccgttggagtagtacaagaaatacttccatccgattgttgtgtacatgtagttgttggtaacgtctgagaaggttgggtagatggcggcgtcgtcgttttttgatctttattaaatttagagataatatcctgaacagcattgctcggcgtcaacgctggaaggagtgaactcgccggcgcatcagtatcttcagacagccaatcaaaaagattagacatatcagatgatgtattagtttgttgtcgtggttttggtgtaggagcagtactactaggtagaagaataggagccgatgtagctgttggaaccggctgtggagttatatgaatagttggttgtagcggttggataggctgtctgctggcggccatcatattatctctagctagttgttctcgcaactgtctttgataatacgactcttgagactttagtcctatttcaatcgcttcatcctttttcgtatccggatccttttcttcagaataatagattgacgactttggtgtagaggattctgccagcctctgtgagaacttgttaaagaagtccatttaaggctttaaaattgaattgcgattataagattaaatggcagacacagacgatattatcgactatgaatccgatgatctcaccgaatacgaggatgatgaagaagaggaagaagatggagagtcactagaaactagtgatatagatcccaaatcttcttataagattgtagaatcagcatccactcatatagaagatgcgcattccaatcttaaacatatagggaatcatatatctgctcttaaacgacgctatactagacgtataagtctatttgaaatagcgggtataatagcagaaagctataacttgcttcaacgaggaagattacctctagtttcagaattttctgacgaaacgatgaagcaaaatatgctacatgtaattatacaagagatagaggagggttcttgtcctatagtcatcgaaaagaacggagaattgttgtcggtaaacgattttgacaaagatggtctaaaattccatctagactatattatcaaaatttggaaacttcaaaaacgatattagaatttatacgaatatcgttctctaaatgtcacaatcaagtctcgcatgttcagcaatttattgtcgtactttatatcgtgttcattaacgatatcttgcaaaatagtaatgattctatcttccttcgatagatattcttcagagattattgtcttatattctttcttgttatcagatatgaatttgataagactttgaacattattgatacccgtctgtttaattttttctacagatattttagttttggcagattctatcgtatctgtcaatagacatccaacatcgacattcgacgtcaattgtctataaatcaacgtataaattttagaaataacattagcgaattgttgtgcgttgatgtcgttattctgaaacagtatgattttaggtagcattttcttaacaaagagaacgtatttattgttactcagttgaacagatgatatatccagattactaacgcatctgattccgtataccaaactttcagaagaaatggtatacaattgtttgtattcattcaatgtctctttttcagaaattagtttagagtcgaatactgcaataattttcaagagatagttttcatcagataagattttatttagtgtagatatgataaaactattgttttgttggagaacttgatacgccgcgttctctgtagtcgacgctctcaaatgggaaacaatctccattatttttttggaatcggatactatatcttcggtatcttgacgcagtctagtatacatagagttaagagagattagagtttgtacattaagcaacatgtctctaaatgtggctacaaacttttcctttttcacatcatctagtttattatataccgatttcacaacggcaccagatttaaggaaccagaatgaaaaactctgataactacaatatttcatcatagttacgattttatcatcttctatagttggtgtaatagcgcatacctttttctccaagactggaaccaacgtcataaaaatgtttaaatcaaaatccatatcaacatctgatgcgctaagaccagtctcgcgttcaagattatctttactaatggtgacgaactcatcgtataaaactctaagtttgtccattatttatttacagatttagttgtttaatttatttgtgctcttccagagttgggatagtatttttctaacgtcggtattatattattaggatctacgttcatatgtatcataatattaatcatccacgttttgataaatctatctttagcttctgaaataacgtatttaaacaaaggagaaaaatatttagctacggcatcagacgcaataacattttttgtaaatgtaacgtatttagacgacagatcttcgttaaaaagttttccatctatgtagaatccatcggttgttaacaccattcccgcgtcagattgaataggagtttgaatagtttgttttggaaatagatccttcaataacttatagttgggtgggaaaaaatcgattttatcactagactctttcttttttactatcattacctcatgaactatttcttgaatgagtatatgtattttctttcctatatcggacgcgttcattggaaaatataccatgtcgttaactataagaatatttttatcctcgtttacaaactgaataatatcagatgtagttcgtaaacgaactatatcatcaccagcacaacatctaactatatgatatccactagtttcctttagccgtttattatcttgttccatattagcagtcattccatcatttaagaaggcgtcaaagataatagggagaaatgacattttggattctgttacgactttaccaaaattaaggatatacggacttactatctttttctcaacgtcaatttgatgaacacacgatgaaaatgtgcttctatgagattgatcatgtagaaaacaacaagggatacaatatttccgcatatcatgaaatatattaagaaatcccaccttattatatttccccaaaggatccatgcacgtaaacattatgccgttatcattaataaagacttctttctcatcggatctgtaaaagttgttactgatttttttcattccaggatctagataattaataatgatgggttttctattcttattctttgtattttggcatatcctagaccagtaaacagtttccactttggtaaaatcagcagacttttgaacgctattaaacatggcattaatggcaataactaaaaatgtaaaatatttttctatgttaggaatatggtttttcactttaatagatatatggtttttggccaaaatgatagatatttttttatccgaggatagtaaaatattattagtcgccgtctctataaaaatgaagctagtctcgatatccaattttattctagaattgataggagtcgccaaatgtaccttatacgttatatctcccttgatgcgttccatttgtgtatctatatcggacacaagatctgtaaatagttttacgttattaatcatcacggtatcgccgtcgctagataacgctaatgtaccatccaagtcccaaatggagagatttaactgttcatcgtttagaataaaatgattaccggtcatattaataaagtgttcatcgtatctagataacaacgacttataattaatgtccaagtcttgaactcgctgaatgatcttttttaacccagttagttttagattggtacgaaatatattgttaaactttgattctacagtaatgtccaaatctagttgtggaaatacttccatcaacattgtttcaaacttgataatattattatctacatcttcgtacgatccaaattccggaatagatgtatcgcacgctctggccacccagataaccaaaaagtcacacgctccaggatatacattgtataaaaagctatcgtttttaagtagggtttttttctgcgtgtatacgaagggattaaaaatagtattatcaacgtaactatattccaaattattcttatgagaatagataataatatcgtccttaatatctaacaaatttcctaaatatccctttaattgagtcattcgaagcgtcaatagaatatgtctcttaactatttccggctgttgtatatttaaatgacttcgtaaaaaataatatatgggcgacttctcatctatgtaatcatatggagtgagatatagggctcgttctacctcctgccccttacccacctgtaataccaattgcggacttactatatatcgcatatttatatcgtggggtaaagtgaaaatctactaccgatgatgtaagtcttacaatgttcgaaccagtaccagatcttaatttggaggcctccgtagaactaggggaggtaaatatagatcaaacaacacctatgataaaggagaatagcggttttatatcccgcagtagacgtctattcgcccatagatctaaggatgatgagagaaaactagcactacgattctttttacaaagactttattttttagatcatagagagattcattatttgttcagatgcgttgacgctgtaaaagacgtcactattaccaaaaaaaataacattatcgtggcgccttatatagcacttttaactatcgcatcaaaaggatgcaaacttacagaaacaatgattgaagcattctttccagaactatataatgaacatagtaagaaatttaaattcaactctcaagtatccatcatccaagaaaaactcggataccagtttggaaactatcacgtttatgattttgaaccgtattactctacagtagctctggctattcgagatgaacattcatctggcatttttaatatccgtcaagagagttatctggtaagttcattatctgaaataacatatagattttatctaattaatctaaaatctgatcttgttcaatggagtgctagtacgggcgctgtaattaatcaaatggtaaatactgtattgattacagtgtatgaaaagttacaactggtcatagaaaatgattcacaatttacatgttcattggctgtggaatcaaaacttccaataaaattacttaaagatagaaatgaattatttacaaaattcattaacgagttaaaaaagaccagttcattcaagataagcaaacgcgataaggatacgctactaaaatattttacttaggactggagttagaatttatagacgactcatttcgtttatcattgttactattattactattactatcattattagtgttggcattattagtattcttcttgtcatcttgttcagaaatatacagcaatgctatacctaatactaaatacattatcatgctcgcaatggctctaacaacaacgaaccaaaatgaatttggtcgtagcttttgttcacaaaaatacataaagaaatgtctacataaatctatggcgccattggctacttgaaatagcgccagtcctcctacagattttaatatagctgtataacatgacatttattcatcatcaaaagagacagagtcaccatctgtcatatttagattttttttcatgtgttcaaagtatcctctactcatttcattataatagtttatcatacttagaattttaggacggatcaatgagtaagacttgactagatcgtcagtagtaatttgtgcatcgtctattctgcatccgcttcgtcgaataatgtatagcatcgctttgagattctccatagctatcaagtctttatacaatgacatggaaatatctgtgaatactttatacttctccaacatcgatgccttaacatcatcgcctactttagcattgaaaatacgttctattgtgtagatggatgtagcaagatttttaaacaacaatgccatcttacacgatgattgcctcaagtctccaatcgtttgtttagaacgattagctacagagtccaatgcttggctgactagcatattattatctttagaaattgtattcttcaatgaggcgtttatcatatctgtgatttcgttagtcatattacagtctgactgggttgtaatgttatccaacatatcacctatggatacggtacacgtaccagcatttgtaataatcctatctaagatgttgtatggcattgcgcagaaaatatcttctcctgtaatatctccactctcgataaatctactcagattattcttaaatgccttattctctggagaaaagatatcagtgtccatcatttcattaatagtatacgcagaaaagataccacgagtatcaattctatccaagatacttatcggttccgagtcacagataatggtttcctctccttcgggagatcctgcatagaaatatctaggacaatagtttctatactgtctgtaactctgataatctctaaagtcactaactgataccatgaaattgagaagatcaaacgctgaagtaattaatttttctgcctcgtttttactacaactagttttcatcaatgtagtgacgatgtattgtttagttacttttggtctaatactgatgatagagatattattgcttcccataatggatcttctagtagtcaccttaaagcccattgatgcgaatagcagatagataaagtcttggtatgactcctttctaatatagtacggactacctttgtcacccaactttatacccacataagccataacaacctctttaatagccgtttcatgaggtttatcagccatgagcctgagtagttggaagaatctcatgaatcccgtctcagaaagtcctatatgcatgatagatttatctttcctgggaaactctcgtatagtcatagatgaaatactctttaaagtttctgaaataagattagtaacagtcttacctccgactactctaggtaacaaacaaactctaataggtgttttctctgcggagataatatcagaaaggatagagcaataagtagtattattgtgattataaagaccgaatacataacaggtagaatttataaacatcatgtcctgaaggtttttagacttgtattcctcgtaatccataccgtcccaaaacatggatttggtaactttgatagccgtagatctttgttccttcgccaacaggttaaagaaattaataaagaatttgttgtttctatttatgtccacaaattgcacgtttggaagcgccacggttacattcactgcagcattttgaggatcgcgagtatgaagtacgatgttattgtttactggtatatctggaaagaaatctaccagtctaggaataagagattgatatcgcatagaaatagtaaagtttataatctcatcatcgaagagcattttgttaccattgtaataaatatccactctgtcatatgtataaatgaagtactgttcaaacatgatgagatgtttatatgttggcatagtagtgagatcgacgtttggtaatggcaatgtattaagattaactccataatgtctagcagcatctgcgatgttataagcgtcgtcaaagcggggtcgatcttgtattgttatatattgtctaacacctataagattatcaaaatcttgtctgcttaatacaccgttaacaatttttgccttgaattcttttattggtgcattaataacatccttatagaggatgttaaacaaataagtgttatcaaagttaagatctggatatttcttttctgctagaacatccattgagtcggagccatctggtttaatataaccaccgataaatctagctctgtattctgtatccgtcaatctaatattaagaaggtgttgagtgaaaggtggaagatcgtaaaagctgtgagtattaatgataggattagtttccgaactaatgttaattggggtattaataatatctatatttccagcgttaagtgtaacattaaacagttttaattcacgtgacgtggtatcaattaaataattaatgcccaatttggatatagcagcctgaagctcatcttgtttagttacggatcctaatgagttattaagcaatatatcgaacggatgaacgaaggttgttttaagttggtcacatactttgtaatctagacatagatgcggaagaacggtagaaactatacgaaataaatattcagagtcctctaattgatcaagagtaactattgacttaataggcatcatttatttagtattaaatgacgaccgtaccagtgacggatatacaaaacgatttaattacagagttttcagaagataattatccatctaacaaaaattatgaaataactcttcgtcaaatgtctattctaactcacgttaacaacgtggtagatagagaacataatgccgccgtagtgtcatctccagaggaaatatcctcacaacttaatgaagatctatttccagatgatgattcaccggccactattatcgaacgagtacaacctcatactactattattgacgatactccacctcctacgtttcgtagagagttattaatatcggaacaacgtcaacaacgagaaaaaagatttaatattacagtatcgaaaaatgctgaagcaataatggaatctagatctatgataacttctatgccaacacaaacaccatccttgggagtagtttatgataaagataaaagaattcagatgttagaggatgaagtggttaatcttagaaatcaacgatctaatacaaaatcatctgataatttagataattttaccaaaatactatttggtaagactccgtacaaatcaacagaagttaataagcgtatagccatcgttaattatgcaaatttgaacgggtcccccttatcagtcgaggacttggatgtttgttcggaggatgaaatagatagaatctataaaacgattaaacaatatcacgaaagtagaaaacgaaaaattatcgtcactaacgtgattattattgtcataaacattatcgagcaggcattgctaaaactcggatttgaagaaatcaaaggactgagtaccgatatcacttcagaaattatcgatgtggagatcggagatgactgcgatgctgtagcatctaaactaggaatcggtaacagtccggttcttaatattgtattgtttatactcaagatattcgttaaacgaattaaaattatttaatttaatacattcccatatccagacaacaatcgtctggattaatctgttcctgtcgtctcataccggacgacatattaatctttttattagtgggcatctttttagatggtttctttttcccagcattaactgagtcgatacctagaagatcgtgattgatctctccgaccattccacgaacttctaattggccgtctctgacggtaccataaactattttaccagcattagtaacagcttggacaatctgaccatccatcgcattgtacgatgtagtagtaactgttgttctacgtctaggagcaccagaagtatttttggagcccttggatgttgatgtagaagaagacgaggattttgattttggtttacatgtaatacattttgaactctttgattttgtatcacatgcgccggcagtcacatctgtttgagaattaagattattgttgcctcctttgacggctgcatctccaccgatttgcgctagtagatttttaagctgtggtgtaatcttattaactgtttcgatataatcatcgtaactgcttctaacggctaaattttttttatccgccatttagaagctaaaaatatttttatttatgcagaagatttaactagattatacaatgaactaatatgatccttttccagattatttacaaacttggtattttttggttctggaggaggcgaatttaaattcggacttggattcggattttgtaagttcttgatcttattatacatcgagtataggatggcgacagtaactgctacacaaataccgatcaaaagaagaataccaatcatttattgacaataacttcactattgatcaagtatgcaatatatcatcttttcactaaataagtagtaataatgattcaacaatgtcgagatatatggacgataataatttagttcatggaaatatcgctatgattggtgtgaatgactccgctaactctgtggggtgcgcagtgctttccccacatagaataaattagcattccgactgtgataataataccaagtataaacgccataatactcaatactttccatgtacgagtgggactggtagacttactaaagtcaataaaggcgaagatacacgaaagaatcaaaagaatgattccagcgattagcacgccggaaaaataatttccaatcataagcatcatgtccatttaactaataaaaattttaaatcgccgaatgaacaaagtggaatataaaccatataaaaacaatagtttgtactgcaaaaataatatctatttttgttttcgaagatatggtaaaattaaatagtagtacacagcatgttataactaacagcagcaacggctcgtaattacttatcatttactagacgaaaaggtggtgggatattttcttgctcaaataatacgaatatatcacccatccattttatgcgatgtttatatactctaatctttaatagatctatagacgacgggtttaccaacaatatagattttatcgattcatctaatttaaacccttccttaaacgtgaatgatctattatctggcataacgatgaccctacctgatgaatcggacaatgtactgggccatgtagaataaattatcaacgaattatcgtctacgaacatttatatcatttgttttaattttaggacgcgaataaatggatataaaatagaaaataacagatattacaaccagtgttatggccgcgcccaaccaggtaggcagttttattttatcttttactacaggttctcctggatgtacgtcaccaacggcggacgtagttctagtacaattagacgtaagttccgcttgggaattttttaacgctaaagagttaacgttaatcgtgcacccaacgtatttacatctagttcgttgaacatcttgattataatataaccattttctatctctagattcgtcagtgcactcatgtaaccaacataccctaggtcctaaatatttatctccggaattagattttggataattcgcgcaccaacaatttctatttcctttatgatcgttacaaaagacgtataatgccgtatccccaaaagtaaaataatcaggacgaataattctaataaactcagaacaatatctcgcatccatatgtttggagcaaatatcggaataagtagacatagccggtttccgttttgcacgtaaccattctaaacaattggggtttccaggatcgtttctacaaaatccagtcatgaaatcgtcacaatgttctgtcttgtaattattattaaatatttttggacagtgtttggtatttgtcttagaacaacattttgccacgctatcactatcgcccaggagataatccttttttataaaatgacatcgttgcccggatgctatataatcagtagcgtgttttaaatccttaatatattcaggagttacctcgttctgataatagattaatgatccaggacgaaatttgaaagaactacatggttctccatgaattaatacatattgtttagcaaattcaggaactataaaactactacaatgatctatcgacataccatctatcaaacaaaacttgggtttaatttctcccggagatgtttcataatagtacgtataactttcttctgcaaacttaacagctctattatattcaggataattaaaacctaattccatatatttgtctcgtatatctgctattcctggtgctattttgattctattaagagtaacagctgcccccattcttaataatcgtcagtatttaaactgttaaatgttggtatatcaacatctaccttatttcccgcagtataaggtttgttgcaggtatactgttcaggaatggttacatttatacttcttctatagtcctgtctttcgatgttcatcacatatgcaaagaacagaataaacaaaataatgtaagaaataatattaaatatctgtgaattcgtaaatacattgattgccataataattacagcagctacaatacacacaatagacattcccacagtgttgccattacctccacgatacatttgagttactaagcaataggtaataactaagctagtaagaggcaatagaaaagatgagataaatatcatcaatatagagattagaggagggctatatagagccaagacgaacaaaatcaaaccgagtaacgttctaacatcattatttttgaagattcccaaataatcattcattcctccataatcgttttgcatcatacctccatctttaggcataaacgattgctgctgttcctctgtaaataaatctttatcaagcactccagcacccgcagagaagtcgtcaagcatattgtaatatcttaaataactcatttatatattaaaaaatgtcactattaaagatggagtataatctttatgccgaactaaaaaaaatgacttgtggtcaacccctaagtctttttaacgaagacggggatttcgtagaagttgaaccgggatcatcctttaagtttctgatacctaagggattttacgcctctccttccgtaaagacgagtctagtattcgagacattaacaacgaccgataataaaatcactagtatcaatccaacaaatgcgccaaagttatatcctcttcaacgcaaagtcgtatctgaagtagtttctaatatgaggaaaatgatcgaatcaaaacgtcctctatacattactcttcacttggcgtgtggatttggtaagactattaccacgtgttatcttatggctacacacggtagaaaaaccgtcatttgcgtacccaataaaatgttaatacatcaatggaagacacaggtagaggcagtcggattggaacataagatatccatagatggagtaagtagtctattaaaggaactaaagactcaaagtccggatgtattaatagtagtcagtagacatctgacaaacgatgccttttgtaaatatatcaataagcattatgatttgttcatcttggatgaatcacatacgtataatctgatgaacaatacagcagttacaagatttttagcgtattatcctccgatgatgtgttattttttaactgctacacctagaccatctaaccgaatttattgtaacagtattattaatattgccaagttatccaatctaaaaaaaactatctatgcagtagatagtttttttgagccatattccacagataatattagacatatggtaaaacgactagatggaccatctaataaatatcatatatataccgagaagttattatctgtagacgagcctagaaatcaacttattcttgataccctggtagaagaattcaagtcaggaactattaatcgcattttagttattactaaactacgtgaacatatggtattattctacaaacgattattagattttttcggaccagaggttgtatttataggagacgcccaaaatagacgtactccagatatggtcaaatcaatcaaggaactaaatagatttatattcgtatccaccttattttattccggtactggtttagatattcctagtttggattcgttgttcatttgctcggcagtaatcaacaatatgcaaatagagcaattactagggagggtatgtcgagaaacagaactattagataggacggtatatgtatttcctaacacatccatcaaagaaataaagtacatgataggaaatttcatgcaacgaattattagtctgtctgtagataaactaggatttaaacaaaaaagttatcggaaacatcaagaatccgatcccacttctgcatgtacaacatcatccagagaagaacgtgtattaaatagaatatttaactcgcaaaatcgttaagaagtttaagcgacgatccgcatgctgcgcaggccagtgtattacccctcatagtattaatataatccaatgatacttttgtgatgtcggaaatcttaaccaatttagactgacaggcagaacacgtcatgcaatcatcatcgtcatcgataactgtagtcttgggcttctttttgcgactcttcattccggaacgcacattggtgctatccatttaggtagtaaaaaataagtcagaatatgccctataacacgatcgtgcaaaacctggtatatcgtctctatctttatcacaatatagtgtatcgacatttttattattattgacctcgtttatcttggaacatggaatgggaacatttttgttatcaacggccatctttgccttaattccagatgttgtaaaattataactaaacagtctatcatcgacacaaatgaaattcttgtttagacgtttgtagtttacgtatgcggctcgttcgcgtctcattttttcagatattgcaggtactataatattaaaaataagaatgaaataacataggattaaaaataaagttatcatgacttctagcgctgatttaactaacttaaaagaattacttagtctgtacaaaagtttgagattttcagattctgcggctatagaaaagtataattctttggtagaatggggaacatctacttactggaaaataggcgtgcaaaaggtagctaatgtcgagacgtcaatatctgattattatgatgaggtaaaaaataaaccgtttaatattgatccgggctattacattttcttaccggtatattttgggagcgtctttatttattcgaagggtaaaaatatggtagaacttggatctggaaactcttttcaaataccagatgatatgcgaagtgcgtgtaacaaagtattagacagcgataacggaatagactttctgagatttgttttgttaaacaatagatggataatggaagatgctatatcaaaatatcagtctccagttaatatatttaaactagctagtgagtacggattaaacatacccaaatatttagaaattgaaatagaggaagacacattatttgacgacgagttatactctattatagaacgctctttcgatgataaatttccaaaaatatccatatcgtatattaagttgggagaacttagacggcaagttgtagactttttcaaattctcattcatgtatattgagtccatcaaggtagatcgtataggagataatatttttattcctagcgttataacaaaatcaggaaaaaagatattagtaaaagatgtagaccatttaatacgatccaaggttagagaacatacatttgtaaaagtaaaaaagaaaaacacattttccattttatacgactatgatggaaacggaacagaaactagaggagaagtaataaaacgaattatagacactataggacgagactattatgttaacggaaagtatttctctaaggttggtagtgcaggcttaaagcaattgactaataaattagatattaatgagtgcgcaactgtcgatgagttagttgatgagattaataaatccggaactgtaaaacgaaaaataaaaaaccaatcagcatttgatttaagcagagaatgtttgggatatccagaagcggattttataacgttagttaataacatgcggttcaaaatagaaaattgtaaggttgtaaatttcaatattgaaaatactaattgtttaaataacccgagtattgaaactatatatggaaactttaaccagttcgtctcaatctttaatgtcgtcaccgatgtcaaaaaaagattattcgagtgaaataatatgcgcctttgatataggtgcaaaaaatcctgccagaactgttttagaagtcaaggataactccgttagggtattggatatatcaaaattagactggagttctgattgggaaaggcgcatagctaaagatttgtcacaatatgaatacactacagttcttctagaacgtcagcctagaaggtcgccgtatgttaaatttatctattttattaaaggctttttatatcatacatcggctgccaaagttatttgcgtctcgcctgtcatgtctggtaattcatatagagatcgaaaaaagagatcggtcgaagcatttcttgattggatggacacattcggattgcgagactccgttccggatagacgcaaattagacgatgtagcggatagtttcaatttggctatgagatacgtattagataaatggaatactaattatacaccttataataggtgtaaatctagaaattacataaaaaaaatgtaataacgttagtaacgccattatggataatctatttacctttctacatgaaatagaagatagatatgccagaactatttttaactttcatctaataagttgcgatgaaataggagatatatatggtcttatgaaagaacgcatttcctcagaggatatgtttgataatatagtgtataataaagatatacatcctgccattaagaaactagtgtattgcgacatccaacttactaaacacattattaatcagaatacgtatccggtatttaacgattcttcacaagtgaaatgttgtcattatttcgacataaactcagataatagcaatattagctctcgtacagtagagatatttgagagggaaaagtcatctcttgtatcatatattaaaactaccaataagaagagaaaggtcaattacggcgaaataaagaaaactgttcatggaggcactaatgcaaattacttttccggtaaaaagtctgacgagtatctgagtactacagttagatccaacattaatcaaccttggatcaaaaccatctctaagaggatgagagttgatatcattaatcactctatagtaacgcgtggaaaaagctctatattacaaactatagaaattatttttactaatagaacatgtgtgaaaatattcaaggattctactatgcacattattctatccaaggacaaggatgaaaaggggtgtatacacatgattgacaaattattctatgtctattataatttatttctgttgttcgaagatatcatccaaaacgagtactttaaagaagtagctaatgttgtaaaccacgtactcacggctacggcattagatgagaaattattcctaattaagaaaatggctgaacacgatgtttatggagttagcaatttcaaaatagggatgtttaacctgacatttattaagtcgttggatcataccgttttcccctctctgttagatgaggatagcaaaataaagttttttaaggggaaaaagctcaatattgtagcattacgatctctggaggattgtataaattacgtgactaaatccgagaatatgatagaaatgatgaaggaaagatcgactattttaaatagcatagatatagaaacggaatcggtagatcgtctaaaagaattgcttctaaaatgaaaaaaaacactaattcagaaatggatcaacgactagggtataagtttttggtgcctgatcctaaagccggagttttttatagaccgttacatttccaatatgtatcgtattctaattttatattgcatcgattgcatgaaatcttgaccgtcaagcggccactcttatcgtttaagaataatacagaacgaattatgatagaaattagcaatgttaaagtgactcctccagattactcacctataatcgcgagtattaaaggtaagagttatgacgcattagccacgttcactgtaaatatctttaaagaggtaatgaccaaagagggtatatccatcactaaaataagtagttatgagggaaaagattctcatttgataaaaattccgctactaataggatacgggaataaaaatccacttgatacagccaagtatcttgttcctaatgtcataggtggagtctttatcaataaacaatctgtcgaaaaagtaggaattaatctagtagaaaagattacaacatggccaaaatttagggttgttaagccaaactcattcactttctcgttttcctccgtatcccctcctaatgtattaccgacaagatatcgccattacaagatatctctggatatatcacaattggaagcgttgaatatatcatcgacaaagacatttataacggtcaatattgttttgctgtctcaatatttatctagagtgagtctagaattcattagacgtagtttatcatacgatatgcctccagaagttgtctatctagtaaacgcgataatagatagtgctaaacgaattactgaatctattactgactttaatattgatacatacattaatgacctggtggaagctgaacacattaaacaaaaatctcagttaacgattaacgagttcaaatatgaaatgctgcataactttttacctcatatgaactatacacccgatcaactaaagggattttatatgatatctttactaagaaagtttctctactgtatcttccacacttctagatatccagatagagattcgatggtttgtcatcgcatcctaacgtacggcaaatattttgagacgttggcacatgatgaattagagaattacataggcaacatccgaaacgatatcatgaacaatcacaagaacagaggcacttacgcggtaaacattcatgtactaacaactcccggacttaatcacgcgttttctagcttattgagtggaaagttcaaaaagtcagacggtagttatcgaacacatcctcactattcatggatgcagaatatttctattcctaggagtgttggattttatccggatcaagtaaagatttcaaagatgttttctgtcagaaaataccatccaagtcaatatctttacttttgttcatcagacgttccggaaagaggtcctcaggtaggtttagtatctcaattgtctgtcttgagttccattacaaatatactaacgtctgagtatttggatttggaaaagaaaatttgtgagtatatcagatcatattataaagatgatataagttactttgaaacaggatttccaatcactatagaaaatgctctagtcgcatctcttaatccaaatatgatatgtgattttgtaactgactttagacgtagaaaacggatgggattcttcggtaacttggaggtaggtattactttagttagggatcacatgaatgaaattcgcattaatattggagcgggaagattagtcagaccattcttggttgtggataacggagagctcatgatggatgtgtgtccggagttagaaagcagattagacgacatgacattctctgacattcagaaagagtttccgcatgtcatcgaaatggtagatatagaacaatttacttttagtaacgtatgtgaatcggttcaaaaatttagaatgatgtcaaaggatgaaagaaagcaatacgatttatgtgactttcctgccgaatttagagatggatatgtagcatcttcactagtgggaatcaatcacaattctggacccagagctattcttggatgtgctcaagctaaacaagctatctcttgtctgagttcggatatacgaaataaaatagacaatggaattcatttgatgtatccagagaggccaatcgtgattagtaaggctttagaaacttcaaagattgcggctaattgcttcggccaacatgttactatagcattaatgtcgtacaaaggtatcaatcaagaggatggaattatcatcaaaaaacaatttattcagagaggcggtctcgatattgttacagccaagaaacatcaagtagaaattccattggaaaactttaataacaaagaaagagataggtctaacgcctattcaaaattagaaagtaatggattagttagactgaatgctttcttggaatccggagacgctatggcacgaaatatctcatcaagaactcttgaagatgattttgctagagataatcagattagcttcgatgtttccgagaaatataccgatatgtacaaatctcgcgttgaacgagtacaagtagaacttactgacaaagttaaggtacgagtattaaccatgaaagaaagaagacccattctaggagacaaatttaccactagaacgagtcaaaagggaacagtcgcgtatgtcgcggatgaaacggaacttccatacgacgaaaatggtatcacaccagatgtcattattaattctacatccatcttctctagaaaaactatatctatgttgatagaagttattttaacagccgcatattctgctaagccgtacaacaataagggagaaaaccgacctgtctgttttcctagtagtaacgaaacatccatcgatacatatatgcaattcgctaaacaatgttatgagcattcaaatccgaaattgtccgatgaagaattatcggataaaatcttttgtgaaaagattctctatgatcctgaaacggataagccttatgcatccaaagtattttttggaccaatttattacttgcgtctgaggcatttaactcaggacaaggcaaccgttagatgtagaggtaaaaagacgaagctcattagacaggcgaatgagggacgaaaacgtggaggaggtatcaagttcggagaaatggagagagactgtttaatagcgcatggtgcagccaatactattacagaagttttgaaagattcggaagaagattatcaagatgtgtatgtttgtgaaaattgtggagacatagcagcacaaatcaagggtattaatacatgtcttagatgttcaaaacttaatctctctcctctcttaacaaaaattgataccacgcacgtatctaaagtatttcttactcaaatgaacgccagaggcgtaaaagtcaaattagatttcgaacgaaggcctccttcgttttataaaccattagataaagttgatctcaagccgtcttttctggtgtaatattctagtttggtagtagatacatatcaatatcatcaaattcgagatccgaattataaaatgggcgtggattgttaactatagaatcggacgtctgatattcgaaaatctgtggagtttcaggttttggtggaggtgtaactgctacttgggatactgaagtctgatattcagaaagctgtggatgttctggttcggcatccaccgatggtgtcacatcactaatcggttcggtaacgtctgtggatggaggtgctacttctacagaacctgtagcctcagttgtcaacggagatacatttttaatgcgagaaaatgtataatttggtaatggtttcttatgtggatctgaagaagaggtaagatatctactagaaagataccgatcacgttctagttctcttttgtagaacttaactttttctttctccgcatctagttgatattccaacctcttcacgttactacgttcagattccaattcacgttcgcatgggttacctccgcagtttttacgagcgatttcacgttcagccttcatgcgtctctccctctctctatcgagtttatcagagcagtctttctgaaggcgatcgaactccataaatttctccaacgctttgattgtttccatagatttccgaagttcagcttttaggactgtgattctttttctttcgaattcacagctggatgtacaaccgtttccattaccgccatctctaagtttcttttctagatcggcaacatttcatccccatgccttttacattcctcgagtctactgtcgtcgaaatatcgttccagctccttttcgacatcaataactttagcacgttgtctctcaagctctcttttgtagttatctgattccctggcacgtttaagatcttcatgcaattgagtcagctcttaacttcctctcttgcttcttcgtcatagtacgcgcaatcactgtgagatccattgttaccacgtctacactcggcgagctcgcgtttaagagattcaatttcccgtttgtattggtccatgtttccattgctaccaccattagatttacaggctgctagttgtcgttcgagatcagaaatacgggttttcttggaattgatttcgtcgatgtacttggcatcgaaacacttattaagttctttttccaattctacgattttatttctttcgcgagtcaattccctcctgtagtaactatctgttttgtcagattcacgctctctacgtagactttcttgcaagttactaatttgttccctagcacgtccgagtttagttttatatgctgaatagagttctgattcatcctttgagcagatctctagcgatcgtttaagattcctaattctagtctttagcctatttacctcctcagaagatgttccgttaccgttgcgtttacactcgttaagctgtctatcaagatccatgattctatctctaagacgttgcatctctctttccatatcagcattgctttcattattacgtctgcagtcactcaactgtctttcaatatctgagattctatctctaagacgtcgcatctctctctgtttcggcattggtttcattattacgtttacagtcgttcaactgtctttcaagatctgatattctagattggagtctgctaatctctgtagcattttcacggcattcactcagttgtctttcaagatctgaaattttagattggagtctgctaatctctgtaagatttcctcctccgctctcgatgcagtcggtcaacttattctctagttctctaatacgcgaacgcagtgcatcaacttcttgcgtgtcttcctggttgcgtgtacattcatcgagtctagattcgagatctctaacgcgtcgtcgttcttcctcaagttctctgcgtactacagaaagcgtgtccttatcttgttgatatttagcaatttctgattctagagtactgattttgcttacgtagttactaatatttgtcttggccttatcaagatcctccttgtatttgtcgcattccttgatatccctacgaagtctggacagttcccattcgacattacgacgtttatcgatttcagctcggagatcgtcatcgcgttgttttagccacatacgactgagttcaagttctcgttgacaagatccatctacttttccattcctaatagtatccagttccttttctagttctgaacgcatttctcgttccctatcaagcgattctctcaattctcggatagtcttcttatcaatttctaataaatctgaaccatcatctgtcccattttgaatatccctgtgttctttgatctcttttgtaagtcggtcgattctttcggttttataaacagaatccctttccaaagtcctaatcttactgagtttatcactaagttctgcattcaattcggtgagttttctcttggcttcttccaactctgttttaaactctccactatttccgcattcttcctcgcatttatctaaccattcaattagtttattaataactagttggtaatcagcgattcctatagccgttcttgtaattgtgggaacataattaggatcttctaatggattgtatggcttgatagcatcatctttatcattattagggggatggacaaccttaattggttggtcctcatctcctccagtagcgtgtggttcttcaataccagtgttagtaataggcttaggcaaatgcttgtcgtacgcgggcacttcctcatccatcaagtatttataatcgggttctacttcagaatattcttttctaagagacgcgacttcgggagttagtagaagaactctgtttctgtatctatcaacgctggaatcaatactcaagttaaggatagcgaatacctcatcgtcatcatccgtatcttctgaaacaccatcatatgacatttcatgaagtctaacgtattgataaatagaatcagatttagtattaaacagatccttaacctttttagtaaacgcatatgtatattttagatctccagatttcataatatgatcacatgccttaaatgtcagtgcttccatgatataatctggaacactaatgggtgacgaaaaagatacagcaccatatgctacgttgataaataaatctgaaccactaagtagataatgattaatgttaagaaagaggaaatattcagtgtataggtatgtcttggcgtcatatcttgtactaaacacgctaaacagtttgttaatgtgatcaatttccaatagattaattagagcagcgggaataccaacaaacatattaccacatccgtattttctatgaatatcacatatcatgttaaaaaatcttgatagaagagcgaatatctcgtctgacttaatgagtcgtagttcagcagcaacataagtcataactgtaaatagaacatactttcctgtagtgttgattctagactccacatcaacaccattattaaaaatagttttatatacatctttaatctgctctccgttaatcgtcgaacgttctagtatacggaaacactttgatttcttatctgtagttaatgacttagtgatatcacgaagaatattacgaattacatttcttgtttttcttgagagacctgattcagaactcaactcatcgttccatagtttttctacctcagtggcgaaatctttggagtgcttggtacatttttcaataaggttcgtgacctccatttattataaaaaatttattcaaaacttaactacaatcgggtaattataaaatcgtagatctcccatgtggcggaatactaccatctatcgcatgtggatggacagtaggtaatggccatgggaacagtaatgtttgcatatttatctttcttgccagtattactgcatattgtcccaatgtttcgatgtgatgttctaacctatcaactgccgctgtatcacaacaatagtgtccgatgaaattaagattatgatccaatgtgtttaatatatgattatcaagtcttatacgatccgcgtcttttttgacaggatcaggttcttctacaggaagaagtttcggcctcttatgatattcatgtctgggaaacggtggtctagggtgaggctccggtatcggagtgggttttggattataatcatcatcgtctatgacatcatcttcgacttcgatatttattttgctatcttgatgatgtcctgtatcagttgcattttcagcactcgactgaatattagcgcattcattgtctattattaccatatttctaaacccaaaatgtatgtgttgaacatcagtactatcgttgatgagtcttatagcatgaattcgcttatcgttatcgggtttatcttctgtcaccttagcaattccttttttattaaactctacataatcatatccatttctattgtttgttctaatataaacgagtatagcatcattgctaaatttttcaatagtatcaaaaacagaatatcctaaaccatataatatatattcaggaacactcaaactaaatgtccaggattctcctaaatacgtaaactttaatagtgcgaaatcattcaaaaatctaccacttatagatagatagtacataaatgcgtatagtagtctacctatctctttattatgaaaaccggcattacgatcatatatgtcgtgatatacctgtgatccgtttacgttaaaccataaatacatgggtgatcctataaacatgaatttatttctaattctcagagctatagttaattgaccgtgtaatatttgcttacatgcatacttgatacgcttattaataagatttttatcattgctcgttatttcagaatcgtatatataaggagtaccatcgtgattcttaccagatattatacaaaatactatatataaaatatattgacccacgttagtaatcatataaatgtttaacgttttaaattttgtattcaatgatccattatcatacgctatcatggtcttgtaatattcattctttaaaatataatattgtgttagccattgcattggagctcctaatggagattttctattctcatccattttaggataggctttcataaagtccctaataacttcgtgaataatgtttctatgttttctactgatgcatgtatttgcttcgatttttttatcccatgtttcatctatcatagatttaaacgcagtaatgctcgcaacattaacatcttgaaccgttggtacaattccgttccataaatttataatgttcgccatttatataactcattttttgaatatacttttaattaacaaaagagttaagttactcatatggacgccgtccagtctgaacatcaatctttttagccagagatatcatagccgctcttagagtttcagcgtgattttccaacctaaatagaacttcatcgttgcgtttacaacacttttctatttgttcaaactttgttgttacattagtaatctttttttccaaattagttagccgttgtttgagagtttcctcattgtcgtcttcatcggctttaacaattgcttcgcgtttagcctctggctttttagcagcctttgtagaaaaaaattcagttgctggaattgcaagatcgtcatctccggggaaaagagttccgtccatttaaagtacagattttagaaactgacactctgcgttatttatatttggtacaacacatggattataaatattgatgttaataacatcagaaaatgtaaagtctatacattgttgcatcgtgttaaattttctaatggatctagtattattgggtccaacttctgcctgaaatccaaatatggaagcggatacaaaaccgtttcctggataaaccacacatctccacttttgctttacatcagaaattgtgtcgttgacatcttgaactctcctatctaatgccggtgttccacctatagattttgaatattcgaatgctgcatgagtagcattaaattccttaatattgccataattttcatatattgagtaaccctggataaaaagtaaacacaccgcagccgtcgctaccacaataaaaaaaattgatagagagttcatttataatctattagaagctgacaaaatttttttacacgcatcagacaatgctttaataaatagttcaacatctacttttgtcatatcgaaccgatggtatgattctaacctagaattacatccgaaaaagttgactatgttcatagtcattaagtcattaacaaacaacattccagactctggattataagacgatactgtttcgtcacaattacctaccttaatcatgtgattatgaatattggctattagagcaccttctaagaaatctataatatctttgaaacacgatttaaaatcaaaccacgaatatacttctacgaagaaagttagtttacccataggagaaataactataaatggagatctaaatacaaaatccggatctatgatagttttaacattattatattctctattaaatacctccacatctaaaaatgttaattttgaaactatgtcttcgtttattaccgtacctgaactaaacgctataagctctattgtttgagaactctttaaacgatattcttgaaatacatgtaacaaagtttcctttaactcggtcggtttatctaccatagttacagaatttgtatccttatctataatataataatcaaaatcgtataaagttatataattatcgcgttcagattgggatcttttcaaatagactaaaaaccccatttctctagtaagtatcttatgtatatgtttgtaaaatatcttcatggtgggaatatgctctaccgcagttagccattcctcattgacagcggtagatgtattagacaaaactattccaatgtttaacaagggccattttacgagattattaaatccttgtttgataaatgtagccaatgagggttcgagttcaacgacgattgaattctcttcccgcggatgctgcatgatgaacgacgggatgttgttcgattgatttggaattctttttcgactttttgtttatattaaatattttaaaatttatagcggatagcaattcatgtaccacggataatgtagacgcgtattgcgcatcgatatctttattattagataaatttatcaataaatgtgagaagtttgcctcgttaaggtcttccatttaaatattatataaacatttgtgtttgtaacttattcgtcttttatggaatagttttttactagtaaagctgcaattacacactttgtccgtaaaacataaatataaacaccagcttttatcaatcgttccaaaaagtcgacggcggacatttttaacatggcatctattttaaatacacttaggtttttggaaaaaacatcattttataattgtaacgattcaataactaaagaaaagattaagattaaacataagggaatgtcatttgtattttataagccaaagcattctaccgttgttaaatacttgtctggaggaggtatatatcatgatgatttggttgtattggggaaggtaacaattaataatctaaagatgatgctattttacatggatttatcatatcatggagtgacaagtagtggagcaatttacaaattgggatcgtctatcgatagactttctctaaataggactattgttacaaaagttaataattatgatgatacattttttgacgacgatgattgatcgctattgcacaattttgtttttgtactttctaatatagtgtttaggttctttttcatatgagaatattgatttactaaaatatctatgtttaacttttgttctatgacgtccttatcggcggtatcggtacatatacgtaattcaccttcacaaaatacggagtcttcgataataatagccaatcgattattggatctagctgtctgtatcatattcaacatgtttaatatatcctttcgtttcccctttacaggcatcgatcgtagcatattttccgcgtctgatatggaaatgttaaaactacaaaaatgcgtaatgttagcccgtcctaatattggtacgtgtctataagtttggcatagtagaataatagacgtgtttaaatgccttccaaagtttaagaattctattagagtattgcattttgatagtttatcgcctacatcatcaaaaataagtaaaaagtgtgctgattttttatgattttgtgcgacagcaatacatttttctatgttacttttagttcgtatcagattatattctagagattcctgactactaacgaaattaatatgatttggccaaatgtatccatcataatctgggttataaacgggtgtaaacaagaatatatgtttatattttttaactagtgtagaaaacagagatagtaaatagatagtttttccagatccagatcctcctgttaaaaccattctaaacggcatttttaataaattttctcttgaaaattgtttttcttggaaacaattcataattatatttacagttactaaattaatttgataataaatcaaaatatggaaaactaaggttgttagtagggaggagaacaaagaaggcacatcgtgatataaataacatttattatcatgatgacaccagaaaacgacgaagagcagacatctgtgttctccgctactgtttacggagacaaaattcagggaaagaataaacgcaaacgcgtgattggtctatgtattagaatatctatggttatttcactactatctatgattaccatgtccgcgtttctcatagtgcgcctaaatcaatgcatgtctgctaacgaggctgctattactgacgccgctgttgccgttgctgctgcatcatctactcatagaaaggttgcgtctagcactacacaatatgatcacaaagaaagctgtaatggtttatattaccagggttcttgttatatattacattcagactaccagttattctcggatgctaaagcaaattgcactgcggaatcatcaacactacccaataaatccgatgtcttgactacctggctcattgattatgttgaggatacatggggatctgatggtaatccaattacaaaaactacatccgattatcaagattctgatgtatcacaagaagttagaaagtatttttgtgttaaaacaatgaactaatatttatttttgtacattaataaatgaaatcgcttaatagacaaactgtaagtaggtttaagaagttgtcggtgccggccgctataatgatgatactctcaaccattattagtggcataggaacatttctgcattacaaagaagaactgatgcctagtgcttgcgccaatggatggatacaatacgataaacattgttatttagatactaacattaaaatgtctacagataatgcggtttatcagtgtcgtaaattacgagctagattgcctagacctgatactagacatctgagagtattgtttagtattttttataaagattattgggtaagtttaaaaaagaccaatgataaatggttagatattaataatgataaagatatagatattagtaaattaacaaattttaaacaactaaacagtacgacggatgctgaagcgtgttatatatacaagtctggaaaactggttaaaacagtatgtaaaagtactcaatctgtactatgtgttaaaaaattctacaagtgacaacaaaaaatgaattaataataagtcgttaacgtacgccgccatggacgccgcgtttgttattactccaatgggtgtgttgactataacagatacattgtatgatgatctcgatatctcaatcatggactttataggaccatacattataggtaacataaaaactgtccaaatagatgtacgggatataaaatattccgacatgcaaaaatgctactttagctataagggtaaaatagttcctcaggattctaatgatttggctagattcaacatttatagcatttgtgccgcatacagatcaaaaaataccatcatcatagcatgcgactatgatatcatgttagatatagaagataaacatcagccattttatctattcccatctattgatgtttttaacgctacaatcatagaagcgtataacctgtatacagctggagattatcatctaatcatcaatccttcagataatctgaaaatgaaattgtcgtttaattcttcattctgcatatcagacggcaatggatggatcataattgatgggaaatgcaatagtaattttttatcataaaagttgtaaagtaaataataaaacaataaatattgaactagtagtacgtatattgagcaatcagaaatgatgctggtacctcttatcacggtgaccgtagttgcgggaacaatattagtatgttatatattatatatttgtaggaaaaagatacgtactgtctataatgacaataaaattatcatgacaaaattaaaaaagataaagagttctaattccagcaaatctagtaaatcaactgatagcgaatcagactgggaggatcactgtagtgctatggaacaaaacaatgacgtagataatatttctaggaatgagatattggacgatgatagcttcgctggtagtttaatatgggataacgaatccaatgttatggcgcctagcacagaacacatttacgatagtgttgctggaagcacgctgctaataaataatgatcgtaatgaacagactatttatcagaacactacagtagtaattaatgaaacggagactgttgaagtacttaatgaagataccaaacagaatcctaactattcatccaatcctttcgtaaattataataaaaccagtatttgtagcaagtcaaatccgtttattacagaacttaacaataaatttagtgagaataatccgtttagacgagcacatagcgatgattatcttaataagcaagaacaagatcatgaacacgatgatatagaatcatcggtcgtatcattggtgtgattagtttcctttttataaaattgaagtaatatttagtattattgctgccgtcacgttgtacaaatggagatattccctgtattcggcatttctaaaattagcaattttattgctaataatgactgtagatattatatagatacagaacatcaaaaaattatatctgatgagatcaatagacagatggatgaaacggtacttcttaccaacatcttaagcgtagaagttgtaaatgacaatgagatgtaccatcttattcctcatagattatcgacgattatactctgtattagttctgtcggaggatgtgttatctctatagataatgacatcaatggcaaaaatattctaacctttcccattgatcatgctgtaatcatatccccactgagtaaatgtgtcgtagttagcaagggtcctacaaccatattggttgttaaagcggatatacctagcaaacgattggtaacatcgtttacaaacgacatactatatgtaaacaatctgtcactgattaattatttgccgttgtctgtattcattattagacgagtcaccgactatttggatagacacatatgcgatcagatatttgctaataataagtggtattcccttataaccatcgacgataagcaatatcctattccatcaaactgtataggtatgtcctctgccaagtacataaattctagcatcgagcaagatactttaatccatgtttgtaacctcgagcatccgttcgactcagtatacaaaaaaatgcagtcgtacaattctctacctatcaaggaacaaatattgtacggtagaattgataatataaatatgagcattagtatttctgtggattaatagatttctagtatggggatcattaatcatctctaatctctaaatacctcataaaacgaaaaaaaagctattatcaaatactgtacggaatggattcattctcttctctttttatgaaactctgttgtatatctactgataaaactggaagcaaaaaatctgatagaaagaataagaataagatcaaggattatatggaacacgattattataaaataacaatagttcctggttcctcttccacgtctactagctcgtggtattatacacatgcctagtaatagtctctttgcgttgacggaaagcagactagaaataacaggctaaaatgttcagacaccataatagttcccaacccagataataacagagttccatcaacacattcctttaaactcaatcccaaacccaaaaccgttaaaatgtatccggccaattgatagtagataatgaggtgtacagcgcatgataatttacacagtaaccaaaatgaaaacactttagtaattataagaaatatagacggtaatgtcatcatcaacaatccgataatatgcctgagagtaaacattgatggataaaacaaaaatgctccgcataactctatcatggcaataacacaaccaaacacttgtaaaattcctaaattagtagaaaatacaacggatatcgatgtataagtgatctcgagaaataataagaataaagtaatgcccgtaaagataaacatcaacattgtttggtaatcattaaaccaattagtatgaagttgaactaatttcacagtagattttattccagtgttatcctcgcatgtataagtacctggtaagatatctttatattccataatcaatgagacatcactatccgataacgaatgaagtctagcactagtatgccatttacttaatattgtcgtcttggaagttttattataagttaaaatatcatggttatccaatttccatctaatatactttgtcggattatctatagtacacggaataatgatggtatcattacatgctgtatactctatagtctttgtagttgttataacaaccaacgtatagaggtatatcaacgatattctaactcttgacattttttatttatttaaaatgatacctttgttatttattttattctattttgctaacggtattgaatggcataagtttgaaacgagtgaagaaataatttctacttacttattagacgacgtattatacacgggtgttaatggggcggtatacacattttcaaataataaactaaacaaaactggtttaactaataataattatataacaacatctataaaagtagaggatgcggataaggatacattagtatgcggaaccaataacggaaatcccaaatgttggaaaatagacggttcagacgacccaaaacatagaggtagaggatacgctccttatcaaaatagcaaagtaacgataatcagtcacaacggatgtgtactatctgacataaacatatcaaaagaaggaattaaacgatggagaagatttgacggaccatgtggttatgatttatacacggcggataacgtaattccaaaagatggtttacgaggagcattcgtcgataaagatggtacttatgacaaagtttacattcttttcactgatactatcggctcaaagagaattgtcaaaattccgtatatagcacaaatgtgcctaaacgacgaaggtggtccatcatcattgtctagtcatagatggtcgacgtttctcaaagtcgaattagaatgtgatatcgacggaagaagttatagacaaattattcattctagaactataaaaacagataatgatacgatactatatgtattcttcgatagtccttattccaagtccgcattatgtacctattctatgaataccattaaacaatctttttctacgtcaaaattggaaggatatacaaagcaattgccgtctccagctcctggtatatgtctaccagctggaaaagttgttccacataccacgtttgaagtcatagaaaaatataatgtactagatgatattataaagcctttatctaaccaacctatcttcgaaggaccgtctggtgttaaatggttcgatataaaggagaaggaaaatgaacatcgggaatatagaatatacttcataaaagaaaattctatatattcgttcgatacaaaatctaaacaaactcgtagctcgcaagtcgatgcgcgactattttcagtaatggtaactgcgaaaccgttatttatagcagatatagggataggagtaggaatgccacaaatgaaaaaaatacttaaaatgtaatcttaatcgagtacaccacacgacaatgaacaaacataagacagattatgctggttatgcttgctgcgtaatatgcggtctaattgttggaattatttttacagcgacactattaaaagttgtagaacgtaaattagttcatacaccatcaatagataaaacgataaaagatgcatatattagagaagattgtcctactgactggataagctataataataaatgtatccatttatctactgatcgaaaaacctgggaggaaggacgtaatgcatgcaaagctctaaattcaaattcggatctaattaagatagagactccaaacgagttaagttttttaagaagccttagacgaggctattgggtaggagaatccgaaatattaaaccagacaaccccatataattttatagctaagaatgccacgaagaatggaactaaaaaacggaaatatatttgtagcacaacgaatactcccaaactgcattcgtgttacactatataacaattacactacatttttatcataccactacttcggttagatgttttagaaaaaaataaatatcgccgtaccgttcttgtttttataaaaataacaattaacaattatcaaattttttctttaatattttacgtggttgaccattcttggtggtaaaataatctcttagtgttggaatggaatgctgtttaatgtttccacactcatcgtatattttgacgtatgtagtcacatcgtttacgcaatagtcagactgtagttctatcatgcttcctacatcagaaggaggaacagttttaaagtctcttggttttaatctattaccgttagttttcatgaaatcctttgttttatccacttcacattttaaataaatgtccactatacattcttttgttaattttactagatcgtcatgggtcatagaatttataggttccgtagtccatggatccaaactagcaaacttcgcgtatacggtatcgcgattagtgtatacaccaactgtatgaaaattaagaaaacagtttaatagatcaacagaaatatttaatcctccgtttgatacagatgcgccatatttatggatttcggattcacacgttgtttgtctgaggtgttcgtctagcgttgcttctacgtaaacttcgattcccatatattctttattgtcagaatcgcataccgatttatcatcatacactgtttgaaaactaaatggtatacacatcaaaataataaatactaacgagtacattctgcaatattgttatcgtaattggaaaattagtgttcgagtgagtcggattatgtgagtactggattttatattttgtaataagaataaaatgctaatgtcaagtcttattaaaaacatatataataaataacaatggctgaatggcataaaattatcgaggatatctcaaaaaataataagttcgaggatgccgccatcgttgattacaagactacaaagaatgttctagctgctattcctaacagaacatttgccaagattaatccgggtgaaattattcctctcatcactaatcgtaatattctaaaacctcttattggtcagaaatattgtattgtatatactaactctctaatggatgagaacacgtatgctatggagttgcttactgggtacgcccctgtatctccgatcgttatagcgagaactcataccgcacttatatttttgatgggtaagccaacaacatccagacgtgacgtgtatagaacgtgtagagatcacgctacccgtgtacgtgcaactggtaattaaaataaaaagtaatattcatatgtagtgtcaattttaaatgatgatgatgaaatggataatatccatattgacgatgtcaataatgccggtattggcatacagttcatcgatttttagatttcattcagaggatgtggaattatgttatgggcatttgtattttgataggatctataatgtagtaaatataaaatataatccgcatattccatatagatataattttattaatcgcacgttaaccgtagatgaactagacgataatgtcttttttacacatggttattttttaaaacacaaatatggttcacttaatcctagtttgattgtctcattatcaggaaacttaaaatataatgatatacaatgctcagtaaatgtatcgtgtctcattaaaaatttggcaacgagtacatctactatattaacatctaaacataagacttattctctacatcggtccacgtgtattactataataggatacgattctattatatggtataaagatataaatgacaagtataatgacatctatgattttactgcaatatgtatgctaatagcgtctacattgatagtgaccatatacgtgtttaaaaaaataaaaatgaactcttaattatgctatgctattagaaatggataaaatcaaaattacggttgattcaaaaattggtaatgttgttaccatatcgtataacttggaaaagataactattgatgtcacacctaaaaagaaaaaagaaaaggatgtattattagcgcaatcagttgctgtcgaagaggcaaaagatgtcaaggtagaagaaaaaaatattatcgatattgaagatgacgatgatatggatgtagaaagcgcgtaatacgatctataaaaataagtatataaatactttttatttactgtactcttactgtgtagtggtgataccctactcgattatttttttaaaaaaaaaatacttattctgattcttctagccatttccgtgttcgtttgaatgccacatcgacgtcaaagataggggagtagttgaaatctagttctgcattgttggtacgcacctcaaatgtagtgttggatatcttcaacgtatagttgttgagtagtgatggttttctaaatagaattctcttcatatcattcttgcacgcgtacatttttagcatccatcttggaatcctagatccttgttctattcccaatggtttcatcaatagaagattaaacatatcgtacgaacacgatggagagtaatcgtagcaaaagtaagcatttcctttaatcttagatcccggatactggatatattttgcagccaacacgtgcatccatgcagcatttcctacatatacccggctatgcaccgcgtcatcatcgactgtacgatacataatgttaccgtgttgcttacattgctcgtaaaagactttcatcaatttgtctccttctccgtaaattccagtgggtcttaggcaacaagtatacaattttgctccattcatgattacggaattattggctttcataaccagttgctcggccatacgtttactttttgcgtatacatgtcctggtgatatatcataaagggtatgctcatggccgatgaatggatcaccgtgtttattgggtcctattgcttccatgctactagtatagatcaaatacttgattcctaggtccacacaagctgccaaaatagtctgtgttccataatagtttactttcatgatttcattatcggtgtattttccaaatacatccactagagcagccgtatgaataatcagatttaccccatctagcgcttctctcaccttatcaaagtcgtttatatcacattgtatatagtttataaccttaactttcgaggttattggttgtggatcttctacaatatctatgactctgatttcttgaacatcatctgcactaattaacagttttactatatacctgcctagaaatccggcaccaccagtaaccgcgtacacggccattgctgccactcataatatcagactacttattctattttactaaataatggctgtttgtataatagaccacgataatatcagaggagttatttactttgaaccagtccatggaaaagataaagttttaggatcagttattggattaaaatccggaacgtatagtttgataattcatcgttacggagatattagtcaaggatgtgattccataggcagtccagaaatatttatcggtaacatctttgtaaacagatatggtgtagcatatgtttatttagatacagatgtaaatatatttacaattattggaaaggcgttatctatttcaaaaaatgatcagagattagcgtgtggagttattggtatttcttacataaatgaaaagataatacattttcttacaattaacgagaatggcgtttgatatatcagttaatgcgtctaaaacaataaatgcattagtttacttttctactcagcaaaataaattagtcatacgtaatgaagttaatgatacacactacactgtcgaatttgatagggacaaagtagttgacacgtttatttcatataatagacataatgacaccatagagataagaggggtgcttccagaggaaactaatattggttgcgcggttagtatgacttacttgtataataagtatagttttaaactgattttagcagaatatataagacacagaaatactatatccggcaatatttattcggcattgatgacactagatgatttggctattaaacagtatggagacattgatctattatttaatgagaaacttaaagtagactccgattcgggactatttgactttgtcaactttgtaaaggatatgatatgttgtgattctagaatagtagtagctctatctagtctagtatctaaacattgggaattgacaaataaaaaatataggtgtatggcattagccgaacatatatctgatagtattccaatatctgagctatctagactacgatacaatctatgtaagtatctacgcggacacactgagagcatagaggataaatttgattattttgaagacgatgattcgtctacatgttctgccgtaaccgacagggaaacggatgtataattttttttatagcgtgaaggatatgataaaaaatataattgttgtatttatcccattccaatcaccttatatgattctgtaacacaataaaggagtcttatagatgtatagaggtcagatactggtttgataaactgtttattccacataagtatgtttgactttatggttagacccgcatactttaacaaatcactgaaaattggagttaggtattgacctctcagaatcagttgccgttctggaacattaaatgtattttttatgatatactccaacgcatttatgtgggcatacaacaagtcattactaatggagtattccaagagttttagttgtctagtatttaacaagagaagagatttcaacagactgtttatgaactcgaatgccgcctcattgtcgcttatattgatgatgtcgaattctcccaatatcatcaccgatgagtagctcatcttgttatcgggatccaagttttctaaagatgtcattaaaccctcgatcatgaatggatttatcatcatcgtttttatgttggacatgagcttagtccgtttgtccacatctatagacgacgatttctgaattatttcatatatctctctctttaactccaggaacttgtcaggatggtctactttaatatgttctcgtctaagagatgaaaatctttggatggttgcacgcgacttttctctaaaggatgacgttgcccaagatcctctcttaaatgaatccatcttatccttggacaagatggacagtctattttccttagatggtttaatatttttgttacccatgatctataaaggtagacctaatcgtctcggatgaccatatatttattttcagttttattatacgcataaattgtaaaaaatatgttaggtttacaaaaatgtctcgtggggcattaatcgtttttgaaggattggacaaatctggaaaaacaacacaatgtatgaacatcatggaatctataccggcaaacacgataaaatatcttaactttcctcagagatccactgtcactggaaaaatgatagatgactatctaactcgtaaaaaaacctataatgatcatatagttaatctattattttgtgcaaatagatgggagtttgcatcttttatacaagaacaactagaacagggaattactttaatagttgatagatacgcattttctggagtagcgtatgccgccgctaaaggcgcgtcaatgactctcagtaagagttatgaatctggattgcctaaacccgacttagttatattcttggaatctggtagcaaagaaattaatagaaacgtcggtgaggaaatttatgaagatgttacattccaacaaaaggtattacaagaatataaaaaaatgattgaagaaggagatattcattggcaaattatttcttctgaattcgaggaagatgtaaagaaggagttgattaagaatatagttatagaggctatacacacggttactggaccagtggggcaactgtggatgtaatagtgaaattacattttttataaatagatgttagtacagtgttataaatggatgaagcatattactctggcaacttggaatcagtactcggatacgtgtccgatatgcataccgaactcgtatcaatatctcaattagttattgccaagatagaaactatagataatgatatattaaacaaggacattgtaaattttatcatgtgtagatcaaacttggataatccatttatctctttcctagatactgtatatactattatagatcaagagaactatcagactgagttgattaattcattagacgacaatgaaattatcgattgtatagttaataagtttatgagcttttataaggataacctagaaaatatagtagatgctatcatcactctaaaatatataatgaataatccagattttaaaactacgtatgcagaagtactcggttccagaatagcggatatagatattaaacaagtgatacgtgagaatatactacaattgtctaataatatccgcgaacgatatttgtgaaaaatattaaaaaaaaatactttttttattaaatgacgtcgcttcgcgaatttagaaaattatgctgtgatatatatcacgcatcaggatataaagaaaaatctaaattaattagagactttataacagatagggatgataaatatttgatcattaagctattgcttcccggattagacgatagaatttataacatgaacgataaacaaattataaaattatatagtataatatttaaacaatctcaggaagatatgctacaagatttaggatacggatatataggagacactattaggactttcttcaaagagaacacagaaatccgtccacgagataaaagcattttaactttagaagaagtggatagtttcttaactacgttatcatccgtaactaaagaatcgcatcaaataaaattattgactgatatcgcatccgtttgtacatgtaatgatttaaaatgtgtagtcatgcttattgataaagatctaaaaattaaagcgggtcctcggtacgtacttaacgctattagtcctcatgcctatgatgtgtttagaaaatctaataacttgaaagagataatagaaaattcatctaaacaaaatctagactctatatctatttctgttatgactccaattaatcccatgttagcggaatcgtgtgattctgtcaataaggcgtttaaaaaatttccatcaggaatgtttgcggaagtcaaatacgatggtgaaagagtacaagttcataaaaataataacgagtttgccttctttagtagaaacatgaaaccagtactctctcataaagtggattatctcaaagaatacataccgaaagcatttaaaaaagctacgtctatcgtattggattctgaaattgttcttgtagacgaacataatgtaccgctcccgtttggaagtttaggaatacacaaaaagaaagaatataaaaactctaacatgtgtttgttcgtgtttgactgtttgtactttgatggattcgatatgacggacattccattgtacgaacgaagatcttttctcaaagatgttatggttgaaatacccaatagaatagtattctcagagttgacgaatattagtaacgagtctcagttaactgacgtattggatgatgcactaacgagaaaattagaaggattggtcttaaaagatattaatggagtatacgaaccgggaaagagaagatggttaaaaataaagcgagactatttgaacgagggttccatggcagattctgccgatttagtagtactaggtgcctactatggtaaaggagcaaagggtggtatcatggcagtctttctaatgggttgttacgacgatgaatccggtaaatggaagacggttaccaagtgttcaggacacgatgataatacgttaagggagttgcaagaccaattaaagatgattaaaattaacaaggatcccaaaaaaattccagagtggttagtagttaataaaatctatattcccgattttgtagtagaggatccgaaacaatctcagatatgggaaatttcaggagcagagtttacatcttccaagtcccataccgcaaatggaatatccattagatttcctagatttactaggataagagaggataaaacgtggaaagaatctactcatctaaacgatttagtaaacttgactaaatcttaatagttacatacaaactgaaaattaaaataacactatttagttggtggtcgccatggatggtgttattgtatactgtctaaacgcgctagtaaaacatggcgaggaaataaatcatataaaaaatgatttcatgattaaaccatgttgtgaaagagtttgtgaaaaagtcaagaacgttcacatcggcggacaatctaaaaacaatacagtgattgcagatttgccatatctggataatgctgtatcggatgtatgcaattcactgtataaaaagaatgtatcaagaatatccagatttgctaatttgataaagatagatgacgatgacaagactcctactggtgtatataattattttaaacctaaagatgccattcctgttattatatctataggaaaggatagagatgtctgtgaactattaatctcatcagacatatcgtgtgcatgcgtggagttaaattcatatcacgtagccattcttcccatggatgtttccttttttaccaaaggaaatgcatcattgattattctcctgtttgatttctctatcgatgcggcacctctcttaagaagtgtaaccgataataatgttattatatctagacaccagcgtctacatgacgagcttccgagttccaattggttcaagttttacataagtataaagtccgactattgttctatattatatatggttgttgatggatctgtgatgcatgcgatagctgataatagaactcacgcaattattagcaaaaatatattagacaatactacgattaacgatgagtgtagatgctgttattttgaaccacagattaggattcttgatagagatgagatgctcaatggatcatcgtgtgatatgaacagacattgtattatgatgaatttacctgatgtaggcgaatttggatctagtatgttggggaaatatgaacctgacatgattaagattgctctttcggtggctggtaatttaataagaaatcgagactacattcccgggagacgaggatatagctactacgtttacggtatagcctctagataatttttttaagcacgaaataaaaaacataattttaaaccaatctatttcatactattttgtgtgatcaccatggacataaagatagatattagtatttctggtgataaatttacggtgactactaggagggaaaatgaagaaagaaaaaaatatctacctctccaaaaagaaaaaactactgatgttatcaaacctgattatcttgagtacgatgacttgttagatagagatgagatgtctactattctagaggaatattttatgtacagaggtctattaggcctcagaataaaatatggacgactctttaacgaaattaaaaaattcgacaatgatgcggaagaacaattcggtactatagaagaactcaagcagaaacttagattaaattctgaagagggagcagataactttatagattatataaaggtacaaaaacaggatatcgtcaaacttactgtatacgattgcatatctatgataggattgtgtgcatgcgtggtagatgtttggagaaatgagaaactgttttctagatggaaatattgtttacgagcgattaaactgtttattaatgatcacatgcttgataagataaaatctatactgcagaatagactagtatatgtggaaatgtcatagaaagttaaaagttaatgagagcaaaaatatataaggttgtattccatatttgttattttttctgtaatagttaaaaaatacattcgatggtctatctatcagattattatgtgttataaggtactttttctcataataaactagagtatgagtaagatagtgtttttcaaaacatataaatctaaaattgatggatgagatatacagctattaatttcgaaaatatattttaatctgataactttaaacatggatttttgatggtggtttaacgttttaaaaaaagattttgttattgtagtatatgataatattaaaagatggatataaagaatttgctgactgcatgtactattttttacattactacattggctacggcagatatacctacttcgtcactgccacacgctccggtaaacggggcatgtgacgagggagaatatcttgataagaggcataatcaatgttgtaatcagtgtccacctggagaatttgccaaggtcagatgtaatggtaacgataacacaaaatgtgaacgctgcccacctcatacatataccgcaatccccaattactctaatggatgtcatcaatgtagaaaatgcccaacaggatcatttgataaggtaaagtgtaccggaacacagaacagtaaatgttcgtgtcttcctggttggtattgcgctactgattcttcacagactgaagattgtcgagattgtataccaaaaaggagatgtccatgcggatactttggtggaatagatgaacaaggaaatcctatttgtaaatcgtgttgtgttggtgaatattgcgactacctacgtaattatagacttgatccatttcctccatgcaaactatctaaatgtaattaattatgattttgatgataatgttaccatacattatatcgctacttggttagtgtattattcagtatgaagacctattaataattacttatcttttgacgatcttgttataattataatataaaaacttatggcatagtaacttataattgctgacgcgataaattcgtaataatctgttttgttcaaaggaatctacaggcataaaaataaaaatataatttataatatactcttacagcgcgccatcatgaataacagcagtaaattaattgctgttattaatggatttagaaatagtggacgattttgtgatattaatatagttattaatgatgaaaggataaacgctcacagactcatcctatctggagcctccgaatatttttccattctgttttccaataattttatcgattctaatgaatacgaagttaatctaagtcatttagattatcaaagcgtaaacgatttgatcgattacatttatgggatacctttgagcctaactaacgataacgtgaaatatattctttcaaccgctgattttttacaaattggatctgctattacggagtgtgaaaattacatacttaaaaatctttgttctagaaactgtatcgatttctacatatacgctgataaatataataacaagaaaatagaatcagcgtcgtttaacacaatattacaaaatattttgagactcatcaacgatgaaaactttaaatacttaacagaggaatcaatgataaaaattttaagcgatgatatgttaaatataaaaaatgaggatttcgccccactaattctcattaaatggttagagagtactcaacaaccatgcaccgtcgagttacttaaatgcctcagaatatcattgctttccccacaagttataaaatcactttatagtcatcgactggttagttcaatctacgaatgtataacattcttaaacaatatagcattcttggatgaatcatttcctagataccatagcatcgagttgatatctatcggtataagtaattcgcatgataagatttccataaactgctacaatcataaaaaaaatacatgggaaatgatatcttcacgtagatataggtgtagtttcgcagtggccgtcctggataatattatttatatgatgggtggatatgatcagtccccgtatagaagttcaaaggttatagcgtacaatacatgtacaaattcttggatatatgatataccagagctaaaatatcctcgttctaattgtgggggactggctgatgacgaatacatttattgtataggcggcatacgcgatcaggattcatcgttgacatctagtattgatagatggaagccatcaaaaccatattggcagaagtatgctaaaatgcgcgaaccaaaatgtgatatgggggttgcgatgttaaacggattaatatatgttataggtggaatcgttaaaggtgacacgtgtaccgacgcactagagagtttatcagaagatggatggatgaagcatcaacgtcttccaataaaaatgtccaatatgtcgacgattgttcatgatggcaagatttatatatctggaggttacaacaatagtagtgtagttaatgtaatatcgaatttagtccttagctataattcgatatatgatgaatggaccaaattatcatcattaaacattcctagaattaatcccgctctatggtcagcgcataataaattatatgtaggaggaggaatatctgatgatgttcgaactaatacatctgaaacatacgacaaagaaaaagattgttggacattggataatggtcacgtgttaccacgcaattatataatgtataaatgcgaaccgattaaacataaatatccattggaaaaaacacagtacacgaatgattttctaaagtatttggaaagttttataggtagttgatagaacaaaatacataattttgtaaaaataaatcactttttatactaatatgacacgattaccaatacttttgttactaatatcattagtatacgctacaccttttcctcagacatctaaaaaaataggtgatgatgcaactctatcatgtaatcgaaataatacaaatgactacgttgttatgagtgcttggtataaggagcccaattccattattcttttagctgctaaaagcgacgtcttgtattttgataattataccaaggataaaatatcttacgactctccatacgatgatctagttacaactatcacaattaaatcattgactgctagagatgccggtacttatgtatgtgcattctttatgacatcgcctacaaatgacactgataaagtagattatgaagaatactccacagagttgattgtaaatacagatagtgaatcgactatagacataatactatctggatctacacattcaccggaaactagttctgagaaacctgattatatagataattctaattgctcgtcggtattcgaaatcgcgactccggaaccaattactgataatgtagaagatcatacagacaccgtcacatacactagtgatagcattaatacagtaagtgcatcatctggagaatccacaacagacgagactccggaaccaattactgataaagaagatcatacagtcacagacactgtctcatacactacagtaagtacatcatctggaattgtcactactaaatcaaccaccgatgatacgtacaatgataatgatacagtaccaccaactactgtaggcggtagtacaacctctattagcaattataaaaccaaggactttgtagaaatatttggtattaccgcattaattatattgtcggccgtggcaatattctgtattacgtattatatatgtaataaacgttcacgtaaatacaaaacagagaacaaagtctagatttttgacttacataaatgtctgggatagtaaaatctatcatattgagcgggccatctggtttaggaaagacagccatagccaaaagactatgggaatatatttggatttgtggtgtcccataccactagatttcctcgtcctatggaacgagaaggtgtcgattaccattacgttaacagagaggccatctggaagggaatagccgccggaaactttctagaacatactgagtttttaggaaatatttacggaacttctaaaactgctgtgaatacagcggctattaataatcgtatttgtgtgatggatctaaacatcgatggcgttagaagtcttaaaaatacgtacctaatgccttactcggtgtatataagacctacctctcttaaaatggttgagaccaagcttcgttgtagaaacactgaagcggatgatgagattcatcgtcgtgtgatgttggcaaaaactgacatggatgaggcaggtgaagccggtctattcgacactattatcattgaagatgatgtgaatttagcatatagtaagttaattcagatactacaggaccgtattagaatgtattttaacactaattagagacttaagacttaaaacttgataattaataatataactcgtttttatatgtggctatttcaacgtctaatgtattagttaaatattaaaacttaccacgtaaaacttaaaatttaaaatgatatttcattgacagatagatcacacattatgaactttcaaggacttgtgttaactgacaattgcaaaaatcaatgggtcgttggaccattaataggaaaaggtggattcggtagtatttatactactaatgacaataattatgtagtaaaaatagagcccaaagctaacggatcattatttaccgaacaggcattttatactagagtacttaaaccatccgttatcgaagaatggaaaaaatctcacaatataaagcacgtaggtcttatcacgtgcaaggcatttggtctatacaaatccattaatgtggaatatcgattcttggtaattaatagattaggtgcagatctagatgcggtgatcagagccaataataatagattaccaaaaaggtcggtgatgttgatcggaatcgaaatcttaaataccatacaatttatgcacgagcaaggatattctcacggagatattaaagcgagtaatatagtcttggatcaaatagataagaataaattatatctagtggattacggattggtttctaaattcatgtctaatggcgaacatgttccatttataagaaatccaaataaaatggataacggtactctagaatttacacctatagattcgcataaaggatacgttgtatctagacgtggagatctagaaacacttggatattgtatgattagatggttgggaggtatcttgccatggactaagatatctgaaacaaagaattgtgcattagtaagtgccacaaaacagaaatatgttaacaatactgcgactttgttaatgaccagtttgcaatatgcacctagagaattgctgcaatatattaccatggtaaactctttgacatattttgaggaacccaattacgacaagtttcggcacatattaatgcagggtgtatattattaagtgtggtgtttggtcgataaaaattaaaaaataacttaatttattattgatctcgtgtgtacaaccgaaatcatggcgatgttttacgcacacgctctcggtgggtacgacgagaatcttcatgcctttcctggaatatcatcgactgttgccaatgatgtcaggaaatattctgttgtgtcagtttataataacaagtatgacattgtaaaagacaaatatatgtggtgttacagtcaggtgaacaagagatatattggagcactgctgcctatgtttgagtgcaatgaatatctacaaattggaaatccgatccatgatcaagaaggaaatcaaatctctatcatcacatatcgccacaaaaactactatgctctaagcggaatcgggtacgagagtctagacttgtgtttggaaggagtagggattcatcatcacgtacttgaaacaggaaacgctgtatatggaaaagttcaacatgattattctactatcaaagagaaggccaaagaaatgagtgcacttagtccaggacctatcatcgattaccacgtctggataggagattgtatctgtcaagttactgctgtggacgtacatggaaaggaaattatgaaaatgagattcaaaaagggtgcggtgcttccgatcccaaatctggtaaaagttaaacttggggagaatgatacagaaaatctttcttctactatatcggcgacaccatcgaggtaaccacctctctggaagacagcgtgaataatgtactcatgaaacgtttggaaactatacgccatatgtggtctgttgtatatgatcattttgatattgtgaatggtaaagaatgctgttatgtgcatacgcatttgtctaatcaaaatcttataccgagtactgtaaaaacaaatttgtacatgaagactatgggatcatgcattcaaatggattccatggaagctctagagtatcttagcgaactgaaggaatcaggtggatggagtcccagaccagaaatgcaggaatttgaatatccagatggagtggaagacactgaatcaattgagagattggtagaggagttcttcaatagatcagaacttcaggctggtgaatcagtcaaatttggtaattctattaatgttaaacatacatctgtttcagctaagcaactaagaacacgtatacggcagcagcttccttctatactctcatcttttaccaacacaaagggtggatatttgttcattggagttgataataatacacacaaagtatttggattcacggtgggttacgactacctcagactgatagagaatgatatagaaaagcatatcaaaagactttgtgttgtgtatttctgtgagaagaaagaggacatcaagtacgcgtgtcgattcatcaaggtatataaacctggggatgaggctacctcgacatacgtgtgcgctatcaaagtggaaagatgctgttgtgctgtgtttgcagattggccagaatcatggtatatggatactaatggtatcaagaagtattctccagatgaatgggtgtcacatataaaattttaattaatgtaactatagagaacaaataataaggttgtaatatcatatagacaataactaacaattaattagtaactgttatctcttttttaattaaccaactaactatatacctattaatacatcgtaattatagttcttaacatctattaatcattaattcgcttctttaattttttataaactaacattgttaattgaaaagggataacatgttacagaatataaattatatatggatttttttaaaaaggaaatacttgactggagtatatatttatctcttcattatatagcacgcgtgttttccaatttttccacatcccatataatacaggattataatctcgttcgaacatacgagaaagtggataaaacaatagttgattttttatctaggttgccaaatttattccatattttagaatatggggaaaatattctacatatttattctatggatgatgctaatacgaatattataattttttttctagatagagtattaaatattaataagaacgggtcatttatacacaatctcgggttatcatcatccattaatataaaagaatatgtatatcaattagttaataatgatcatccagataataggataagactaatgcttgaaaatggacgtagaacaagacattttttgtcctatatatcagatacagttaatatctatatatgtattttaataaatcatggattttatatagatgccgaagacagttacggttgtacattattacatagatgtatatatcactataagaaatcagaatcagaatcatacaatgaattaattaagatattgttaaataatggatcagatgtagataaaaaagatacgtacggaaacacaccttttatcctattatgtaaacacgatatcaacaacgtggaattgtttgagatatgtttagagaatgctaatatagactctgtagactttaatagatatacacctcttcattatgtctcatgtcgtaataaatatgattttgtaaagttattaatttctaaaggagcaaatgttaatgcgcgtaataaattcggaactactccattttattgtggaattatacacggtatctcgcttataaaactatatttggaatcagacacagagttagaaatagataatgaacatatagttcgtcatttaataatttttgatgctgttgaatctttagattatctattatccagaggagttattgatattaactatcgtactatatacaacgaaacatctatttacgacgctgtcagttataatgcgtataatacgttggtctatctattaaacaaaaatggtgattttgagacgattactactagtggatgtacatgtatttcggaagcagtcgcaaacaacaacaaaataataatggaagtactattgtctaaacgaccatctttgaaaattatgatacagtctatgatagcaattactaaacataaacagcataatgcagatttattgaaaatgtgtataaaatatactgcgtgtatgaccgattatgatactcttatagatgtacagtcgctacagcaatataaatggtatattttaagatgtttcgatgaaatagatatcatgaagagatgttatataaaaaataaaactgtattccaattagttttttgtatcaaagacattaatactttaatgagatacggtaaacatccttctttcgtgaaatgcactagtctcgacgtatacggaagtcgtgtacgtaatatcatagcatctattagatatcgtcagagattaattagtctattatccaagaagctggatcctggagataaatggtcgtgttttcctaacgaaataaaatataaaatattggaaaactttaacgataacgaactatccacatatctaaaaatcttataaacattattaaaatataaaatctaagtaggataaaatcacactacatcattgtttccttttagtgctcgacagtgtatactatttttaacgctcataaataaaaatgaaaacgatttccgttgttacgttgttatgcgtactacctgctgttgtttattcaacatgtactgtacccactatgaataacgctaaattaacgtctaccgaaacatcgtttaatgataaccagaaagttacgtttacatgtgatcagggatatcattctttggatccaaatgctgtctgtgaaacagataaatggaaatacgaaaatccatgcaaaaaaatgtgcacagtttctgattatgtctctgaactatataataaaccgctatacgaagtgaattccaccatgacactaagttgcaacggcgaaacaaaatattttcgttgcgaagaaaaaaatggaaatacttcttggaatgatactgttacgtgtcctaatgcggaatgtcaacctcttcaattagaacacggatcgtgtcaaccagttaaagaaaaatactcatttggggaatatataactatcaactgtgatgttggatatgaggttattggtgcttcgtacataagttgtacagctaattcttggaatgttattccatcatgtcaacaaaaatgtgatatgccgtctctatctaatggattaatttccggatctacattttctatcggtggcgttatacatcttagttgtaaaagtggttttacactaacggggtctccatcatccacatgtatcgacggtaaatggaatcccgtactcccaacatgtgtacgatctaacgaaaaatttgatccagtggatgatggtcccgacgatgagacagatttgagcaaactctcgaaagacgttgtacaatatgaacaagaaatagaatcgttagaagcaacttatcatataatcatagtggcgttaacaattatgggcgtcatatttttgatctccgttatagtattagtttgttcctgtgacaaaaataatgaccaatataagttccataaattgctaccgtaaatataaatccgttaaaataattaataacgaacaagtatcaaaagattaaagacttatagctagaatcaattgagatgtcttcttcagtggatgttgatatctacgatgccgttagagcatttttactcaggcactattatgacaagagatttattgtgtatggaagaagtaacgccatattacataatatatacaggctatttacaagatgcgccgttataccgttcgatgatatagtacgtactatgccaaatgaatcacgtgttaaacaatgggtgatggatacacttaatggtataatgatgaatgaacgcgatattactgtatgtgtgggcaccggactacgattcatggaaatgtttttcgattacaataaaaatagtatcaacaatcaactaatgtatgatataattctagctaatgagagatatagaagcgcttttaacgacgatggtatatacatccgtagaaatatgattaacaagttgtacggatacgcatctctaactactattggcacgatcgctggaggtgtttgttattatctgttgatgcatctagttagtttgtataaataattatttcaatatactagttaaaattttaagattttaaatgtataaaaaactaataacgtttttatttgtaataggtgcattagcatcctattcgaataatgagtacactccgtttaataaactgagtgtaaaactctatatagatggagtagataatatagaaaattcatatactgatgataataatgaattggtgttaaattttaaagagtacacaatttctattattacagagtcatgcgacgtcggatttgattccatagatataaatgttataaacgactataaaattattgatatgtataccattgactcgtctactattcaacgcagaggtcacacgtgtagaatatctaccaaattatcatgccattatgataagtacccttatattcacaaatatgatggtgatgagcgacaatattctattactgcagagggaaaatgctataaaggaataaaatatgaaataagtatgatcaacgatgatactctattgagaaaacatactcttaaaattggatctacttatatatttgatcgtcatggacatagtaatacatattattcaaaatatgatttttaaaaatttaaaatatattatcacttcagtgacagtagtcaaataacaaacaacaccatgagatatattataattctcgcagttttgttcattaatagtatacatgctaaaataactagttataagtttgaatccgtcaattttgattccaaaattgaatggactggggatggtctatacaatatatcccttaaaaattatggcatcaagacgtggcaaacaatgtatacaaatgtaccagaaggaacatacgacatatccgcatttccaaagaatgatttcgtatctttctgggttaaatttgaacaaggcgattataaagtggaagagtattgtacgggactatgcgtcgaagtaaaaattggaccaccgactgtaacattgactgaatacgacgaccatatcaatttgtacatcgagcatccgtatgctactagaggtagcaaaaagattcctatttacaaacgcggtgacatgtgtgatatctacttgttgtatacggctaacttcacattcggagattctaaagaaccagtaccatatgatatcgatgactacgattgcacgtctacaggttgcagcatagactttgtcacaacagaaaaagtgtgcgtgacagcacagggagccacagaaaggtttctcgaaaaaattactccatggagttcgaaagtatgtctgacacctaaaaagagtgtatatacatgcgcaattagatccaaagaagatgttcccaatttcaaggacaaaatggccagagttatcaagagaaaatttaatacacagtctcaatcttatttaactaaatttctcggtagcacatcaaatgatgttaccacttttcttagcatgcttaacttgactaaatattcataactaatttttattaatgatacaaaaacgaaataaaactgcatattatacactggttaacgcccttataggctctaaccattttcaagatgaggtccctgattatagtccttctgttcccctctatcatctactccatgtctattagacaatgtgagaagactgaagaggaaacatggggattgaaaatagggttgtgtataattgccaaagatttctatcccgaaagaactgattgcagtgttcatctcccaactgcaagtgaaggattgataactgaaggcaatggattcagggatatacgaaacaccgataaattataaaaaaagcaatgtgtccgctgtttccgttaataatactattttcgtaactggcggattattcataaataactctaatagcacgatcgtggttaacaatatggaaaaacttgacatttataaagacaaacaatggtcgattatagaaatgcctatggctagggtatatcacggcatcgactcgacatttggaatgttatattttgccggaggtctatccgttaccgaacaatatggtaatttagagaaaaacaacgagatatcttgttacaatcctagaacgaataagtggtttgatatttcatatactatttataagatatccatatcatcattgtgtaaactaaataacgtcttctatgtatttagtaaggacattggatatgtggaaaagtatgatggtgcatggaagttagtacatgatcgtctccccgctataaaggcattatcaacttctccttattgattgaaaatgaaaatataaatagtttttatgtatagcagtattaccctatagttttattgcttactactaacatggatacagatgttacaaatgtagaagatatcataaatgaaatagatagagagaaagaagaaatactaaaaaatgtagaaattgaaaataataaaaacattaacaagaatcatcccaatgaatatattagagaagcactcgttattaataccagtagtaatagtgattccattgataaagaagttatagaatgtatcagtcacgatgtaggaatatagatcatatctactaatttttataatcgatacaaaacataaaaaacaactcgttattacatagcaggcatggaatccttcaagtattgttttgataacgatggcaagaaatggattatcggaaatactttatattctggtaattcaatactctataaggtcagaaaaaatttcactagttcgttctacaattacgtaatgaagatagatcacaaatcacacaagccattgttgtctgaaatacgattctatatatctgtattggatcctttgactatcgacaactggacacgggaacgtggtataaagtatttggctattccagatctgtatggaattggagaaaccgatgattatatgttcttcgttataaagaattcgggaagagtattcgccccaaaggatactgaatcagtcttcgaagcatgcgtcactatgataaacacgttagagtttatacactctcgaggatttacccatggaaaaatagaaccgaggaatatactgattagaaataaacgtctttcactaattgactattctagaactaacaaactatacaagagtggaaactcacatatagattacaacgaggacatgataacttcaggaaatatcaattatatgtgtgtagacaatcatcttggagcaacagtttcaagacgaggagatttagaaatgttgggatattgcatgatagaatggttcggtggcaaacttccatggaaaaacgaaagtagtataaaagtaataaaacaaaaaaaagaatataaaaaatttatagctactttctttgaggactgttttcctgaaggaaatgaacctctggaattagttagatatatagaattagtatacacgttagattattctcaaactcctaattatgacagactacgtagactgtttatacaagattgaaattatattcttttttttatagagtgtggtagtgttacggatatctaatattaatattagactatctctatcgcgctacacgaccaatatcgattactatggatatcttctatgaaaggagagaatgtattcatttctccagcgtcaatctcgtcagtattgacaatactgtattatggagctaatggatccactgctgaacagctatcaaaatatgtagaaacggaggagaacacggataaggttagcgctcagaatatctcattcaaatccatgaataaagtatatgggcgatattctgccgtgtttaaagattcctttttgagaaaaattggcgataagtttcaaactgttgacttcactgattgtcgcactatagatgcaatcaacaagtgtgtagatatctttactgaggggaaaatcaatccactattggatgaaccattgtctcctagcaattagtgccgtatactttaaagcaaaatggttgacgccattcgaaaaggaatttaccagtgattatcccttttacgtatctccgacggaaatggtagacgtaagtatgatgtctatgtacggcgagctatttaatcacgcatctgtaaaagaatcattcggcaacttttcaatcatagaactgccatatgttggagatactagtatgatggtcattcttccagacaagattgatggattagaatccatagaacaaaatctaacagatacaaattttaagaaatggtgtgactttatggatgctatgtttatagatgttcacattcccaagtttaaggtaacaggttcgtataatctggtggatactctagtaaagtcaggactgacagaggtgttcggttcaactggagattatagcaatatgtgtaatttagatgtgagtgtcgacgctatgatccacaaaacgtatatagatgtcaatgaagagtatacagaagcagctgcagcaacttctgtactagtggcagactgtgcatcaacagttacaaatgagttctgtgcagatcatccgttcatctatgtgattaggcatgttgatggcaaaattcttttcgttggtagatattgctctccaacaactaattgttaaccattttttttaaaaaaaatagaaaaaacatgtggtattagtgcaggtcgttgttcttccaattgcaattggtaagatgacggccaactttagtacccacgtcttttcaccacagcactgtggatgtgacagactgaccagtattgatgacgtcaaacaatgtttgactgaatatatttattggtcgtcctatgcataccgcaacaggcaatgcgctggacaattgtattccacactcctctcttttagagatgatgcggaattagtgttcatcgacattcgcgagctggtaaaaaatatgccgtgggatgatgtcaaagattgtgcagaaatcatccgttgttatataccggatgagcaaaaaaccatcagagagatttcggccatcatcggactttgtgcatatgctgctacttactggggaggtgaagaccatcccactagtaacagtctgaacgcattgtttgtgatgcttgagatgctaaattacgtggattataacatcatattccggcgtatgaattgatgagttgtacatcttgacattttctttcttctcttctccctcttctccctttcccagaaacaaactttttttacccactataaaataaaatgagtatactacctattatatttcttcctatatttttttattcttcattcgttcagacttttaacgcgcctgaatgtatcgacaaagggcaatattttgcatcattcatggagttagaaaacgagccagtaatcttaccatgtcctcaaataaatacgctatcatccggatataatatattagatattttatgggaaaaacgaggagcggataatgatagaattataccgatagataatggtagcaatatgctaattctgaacccgacacaatcagactctggtatttatatatgcattaccacgaacgaaacctactgtgacatgatgtcgttaaatttgacaatcgtgtctgtctcagaatcaaatatagatcttatctcgtatccacaaatagtaaatgagagatctactggcgaaatggtatgtcccaatattaatgcatttattgctagtaacgtaaacgcagatattatatggagcggacatcgacgccttagaaataagagacttaaacaacggacacctggaattattaccatagaagatgttagaaaaaatgatgctggttattatacatgtgttttagaatatatatacagaggtaaaacatataacgtaaccagaattgtaaaattagaggtacgggataaaataataccttctactatgcaattaccagatggcattgtaacttcaataggtagtaatttgactattgcatgcagagtatcgttgagacctcccacaacggacaccgacgtcttttggataagtaatggtatgtattacgaagaagatgatggggacggaaacggtagaataagtgtagcaaataaaatctatatgaccgataagagacgtgttattacatcccggttaaacattaatcctgtcaaggaagaagatgctacaacgtttacgtgtatggcgtttactattcctagcatcagcaaaacagttactgttagtataacgtgaatgtatgttgttacatttccatgtcaattgagtttataagaatttttatacattatcttccaacaagcaattgacgaacgtattgctatgattaactcccacgatactatgcatattattaatcattaacttgcagactatacctagagctattttgacatactcgtgttcttgtgtaattgcagtatctatattattaaagtacgtaaatctagctatagttttattatttaattttagataatataccgtctccttatttttaaaaattgttacatcctttattaaatcatgaatgggaatttctatgtcatcgttagtatattgtgaacaacaagagcagatatctataggaaagggtggaatgcgatacattgatctatgtagttttaaaacacacgcaaactttgaagaatttatataaatcattccatcgatacatccttctatgttgagatgtatatatccaggaattcgtttattaatatcgggaaatgtataaactaaaacattgcccgaaagcggtgcctctatctgcgttatatccgttcttaacttacaaaatgtaaccaatacctttgcatgacttgttttgttcggcaacgttagtttaaacttgacgaatggattaattacaatagcatgatccgcgcatctattaagtttttttactttaacgcccttgtatgtttttacagagactttatctaaatttctagtgcttgtatgtgttataaatataacgggatatagaaccgaatcacctaccttagatacccaattacattttatcagatccagataataaacaaattttgtcgccctaactaattctatattgttatatattttacaattggttatgatatcatgtaataacttggagtctaacgcgcatcgtcgtacgtttatacaattgtgatttagtgtagtatatctacacatgtatttttccgcactatagtattctggactagtgataaaactatcgttatatctgtcttcaatgaactcatcgagatattgctctctgtcatattcatacacctgcataaactttctagacatcttacaatccgtgttattttaggatcatatttacatatttacgggtatatcaaagatgttagattagttaatgggaatcgtctataataatgaatattaaacaattatatgaggacttttaccacaaagcatcataaaaatgagtcgtcgtctgatttatgttttaaatatcaaccgcgaatcaactcataaaatacaagagaatgaaatatatacatattttagtcattgcaatatagaccatacttctacagaacttgattttgtagttaaaaactatgatctaaacagacgacaacctgtaactgggtatactgcactacactgctatttgtataataattactttacaaacgatgtactgaagatattattaaatcatggagtggatgtaacgatgaaaaccagtagcggacgtatgcctgtttatatattgcttactagatgttgcaatatttcacatgatgtagtgatagatatgatagacaaagataaaaaccacttatcgcatagagactattccaacctactactagagtatataaaatctcgttacatgttattgaaggaagaggatatcgatgagaacatagtatccactttattagataagggaatcgatcctaactttaaacaagacggatatacagcgttacattattattatttgtgtctcgcacacgtttataaaccaggtgagtgtagaaaaccgataacgataaaaaaggccaagcgaattatttctttgtttatacaacatggagctaatctaaacgcgttagataattgtggtaatacaccattccatttgtatcttagtattgaaatgtgtaataatattcatatgactaaaatgctgttgacttttaatccgaatttcgaaatatgtaataatcatggattaacgcctatactatgttatataacttccgactacatacaacacgatattcttgttatgttaatacatcactatgaaacaaatgttggagaaatgccgatagatgagcgtcgtatgatcgtattcgagtttatcaaaacatattctacacgtccggcagattcgataacttatttgatgaataggtttaaaaatataaatatttatacccgctatgaaggaaagacattattacacgtagcatgtgaatataataatacacaagtaatagattatcttatacgtatcaacggagatataaatgcgttaaccgacaataacaaacacgctacacaactcattatagataacaaagaaaattccccatataccattaattgtttactgtatatacttagatatattgtagataagaatgtgataagatcgttggtggatcaacttccatctctacctatctttcgtcgcttatcatactagtcatatcctaaatgttgatcatattccaccaaatgattgtgaaagagattgagattaaatcgtctaacaaacaattagtttttatgacattaacatataataaataaattaatcattattgacttaacgatgacgaaagttatcatcatcttaggattcttgattattaatacaaattcattgtctatgaaatgtgaacaaggtgtctcatattataattcacaagaattaaagtgttgtaaactatgtaagccaggaacatattcagatcatcgatgtgataaatacagcgataccatttgtggacattgtccgagtgacacattcacgtcaatatataatcgttctccttggtgtcatagttgtagaggtccatgtggtactaatcgagtagaggtcacaccttgtacacctaccacaaatagaatctgtcattgtgactcgaatagttattgtctccttaaagcttctgatggtaactgtgttacatgtgctcctaaaacaaaatgtggtcgtgggtatggaaagaaaggagaagatgaaatgggtaataccatttgtaagaaatgtcggaagggtacttattcagatattgtatctgactctgatcaatgtaaaccaatgacaagataagacttactcgcatctactggatagacataaaatatcctcctcgtaataatgaaatataaatatacactaattattaatatcaataacaatcgagtattaatatataggtcatttttaaatcccttttgggttccgtcccaaacggcgtttcggtctgcgtcgccgccatggccatgccgagcctctccgcgtgctcctccatcgaggacgacttcaactatggcagctcggtggcgtctgccagcgtgcacatacgaatggcatttctaagaaaagtctacggtatcctttgtctacaatttcttttaacaacggcaacaactgcagtatttttatactttgactgcatgcggacatttatacaagggagtcctgttctaatattggcatcaatgttcggatctataggcttgattttcgcattgactttacacagacataaacatcccctgaatctgtacctgctttgtggatttacactgtcggaatctctaacgctggcctctgttgttactttctatgatgtgcatgtcgttatgcaagctttcatgctgactactgcagcgtttcttgctctgactacatatactctacaatcaaagagagatttcagtaaacttggagcaggattgtttgctgctttgtggattttaattttgtcaggactcttggggatatttgtgcaaaatgagacagtgaagctggtcctgtctgcttttggggcccttgtattctgtggattcattatctatgacacgcactcactaatacataagctctcgcctgaagagtatgtgttagcctctatcaatctctacttggatatcatcaatctgttcttgcatctgttgcagcttttggaagtatctaataagaaataaagtttaaaatagaattaataaaaacatataggtcattttttaaacatggattggaaaccaaggtagttagttaatacacacaagatatatttttttcacatcatccacccatgggtaacaccaaggttgttagttaataatatacaagatattttttctcactctgatccatgtaaaccaaggacgagataagacactctcattcctcatccacaaccccattaaaaaaatggaaattaaagccctctattagcataaacggctacaggtctaccatcaggttaaccttcgtctaccttcacaatggcctctccttgtgcccagttcagaccctgtcattgccactccctgaataccgtggccgacgtcagacattgtctgactgaatacatcctgtgggtttctcatagatggacccatagagaaactgcagggcctctctacaggcttctcatctctttcagaactgatgcaacggagctctttggtggtgagttgaaggagttctcggattcacttccgtgggacaatatcgacaattgcgtggagatcattaaatgtttcatcagaaatgactccatgaaaaccgccgaagaacttcgtgcaatcattggactttgtactcaatcagctatcgtctctggaagagtcttcaacgataagtatatcgacatactacttatgctgcgaaagattctgaacgagaacgactatctcaccctcttggatcatatccgcactgctaaatactaaatctccttcatgctctctcactacactttttatcatcttatgaggaatgattgccttcgtgaaataggaataattagcaccagaatagctatggattgcacatgtattctatgtcgtctactggatgaagatgtgacgtacaaaaaaataaaactagaaattgaaacgtgtcacaacttatcaaaacatatagatagacgaggaaacaatgcgctacattgttacgtctccaataaatgcgatacagacattaagattgttctctcgcggagtcgagagactttgtagaaacaacgaaggattaactccgctaggagcatacagtaagcatagatacgtaaaatctcagattgtgcatctactgatatccagctattcaaattcctctaacgaactcaagtcgaatataaatgatttcgatctgtattcgtataatatcgacttacgtctgctaaaatacctaattgtggataaacggatacgtccgtccaagaatacgaattatgcaatcaatggtctcggattggtggatatatacgtaacgacgcctaatccgagaccagaagtattgctatggcttcttaaatcagaatgttacagcaccggttacgtatttcgtacctgtatgtacgacagtgatatgtgtaagaactctcttcattactatatatcgtctcatagagaatctcaatctctatccaaggatgtaattaaatgtttgatcaataacaatgtttccatccatggcagagacgaaggaggatctttacccatccaatactactggtctttctcaaccatagatatagagattgttaaattattattaataaaggatgtggacacgtgtagagtatacgacgtcagccctatattagaggcgtattatctaaacaagcgatttagagtaaccccatataatgtagacatggaaatcgttaatcttcttattgagagacgtcatactcttgtcgacgtaatgcgtagtattacttcgtacgattccagagaatataaccactacatcatcgataacattctaaagagatttagacaacaggatgtacaagccatgttgataaactacttacattacggcgatatggtaagtatacctatcattcaatgcatgttagataacggagcaaccatggataagacgacggacaacaactatcctctacacgactactttgttaataataatctcgtcgatgtaaacgtcgtaaggtttatcgtggaaaatatggacacgcggctgtaaatcacatatcgaacaatggccgtctatgtatgtacggtctgatattatcgagatttaataattgcgggtatcactgttatgaaaccatactgatagatgtatttgatatactaagcaagtacatggatgatatagatatgatcgataactctactatattacgcggtcgatgtcaataatatacaatttgcaaagcggttattggaatatggagcgagtgtcacaacatcacgctcgataatcaatacggccatccagaaaagcagttaccaaagagaaaacaaaacgaggatagttgatttattactgagttaccatcccactctagagactatgattgacgcatttaatagagatatacgctatctatatcctgaaccattatcggcatgtatcagatacgccttaatcctagatgatgattttccttctaaagtaaagtatgatatcgccggtcgtcataaggaactaaagcgctatagagtagacattaatagaatgaagaatgcctacatatcaggcgtctccatgtttgatatattatttaaacgaagcaaacgccacagattgagatacgcaaagaatccgacatcaaatggtacaaaaaagaactaacgtccatcattacagaaactgtaaagaacaatgagaggatcgactccatagtggacaacattaatacagacgataacttgatttcgaaattacccatggagatactttattactccattaaataatttatcatggagcgataatgtcctgtttcatttgtttccatgacatattacaaaatcgattccgtccaagatgataaaaacatttaccggcatcataaacacggagtttattttatatgtctcgcataaacattactaaaaaaatatattgttcggttttctttcacatctttaattatgaaaaagtaaatcattatgagatggacgagattgtacgcatcgttcgcgacagtatgtggtacatacctaacgtatttatggacgacggtaagaatgaaggtcacgtttctgtcaacaatgtctgtcatatgtattttacgttctttgatgtggatacatcgtctcatctgtttaagctagttattaaacactgcgatctgaataaacgaggtaactctccattacattgctatacgatgaatacacgatttaatccatctgtattaaagatattgttacaccacggcatgcgtaactttgatagcaaggatgaccactatcaatcgataacaagatctttgatatactaacggacaccattgatgactttagtaaatcatccgatctattgctgtgttatcttagatataaattcaatgggagcttaaactattacgttctgtacaaaggatccgaccctaattgcgccgacgaggatgaactcacttctcttcattactactgtaaacacatatccacgttctacgaaagcaattattacaagttaagtcacactaagatgcgagccgagaagcgattcatctacgcgataatagattatggagcaaacattaacgcggttacacacttaccttcaacagtataccaaacatagtcctcgtgtggtgtatgctcttttatctcgaggagccgatacgaggatacgtaataatcttgattgtacacccatcatggaacgattgtgcaacaggtcatattctcataatgttactcaattggcacgaacaaaaggaagaaggacaacatctactttatctattcataaaacataatcaaggatacactctcaatatactacggtatctattagataggttcgacattcagaaagacgaatactataataccgcctttcaaaattgtaacaacaatgttgcctcatacatcggatacgacatcaaccttccgactaaagacggtattcgacttggtgtttgaaaacagaaacatcatatacaaggcggatgttgtgaatgacatcatccaccacagactgaaagtatctctacctatgattaaatcgttgttctacaagatgtctctccctacgacgattactacgtaaaaaagatactagcctactgcctattaagggacgagtcattcgcggaactacatagtaaattctgtttaaacgaggactataaaagtgtatttatgaaaaatatatcattcgataagatagattccatcatcgtgacataagtcgcctcaaagagattcgaatctccgacaccgacctgtatacggtatcacagctatcttaaagccatacattcagacagtcacatttcatttcccatgtacgacgatctcatagaacagtgccatctatcgaaactcgtcgacaaagcactcaataaattagagtctaccatcgatggccaatctagactatcgtatttgcctccggaaattatgcgcaatatcatctaaacagtatgttgtacggaaagaaccattacaaatattatccatgattggagaagtaggaaacaggaacaagacaacgattactacattattaaattatgaagtccgtattatactcgtatatattgtttctctcatgtataataataaacggaagagatatagcaccgcatgcaccatccgatggaaagtgtaaagacaacgaatacaaacgccataatctgtgtccgggaacatacgcttccagattatgcgatagcaagactaacacacgatgtacgccgtgtggttcgggtaccttcacatctcgcaataatcatttacccgcttgtctaagttgtaacggaagacgcgatcgtgtaacacgactcacaatagaatctgtgaatgctctcccggatattattgtcttctcaaaggatcatccggatgcaaggcatgtgtttcccaaacaaaatgtggaataggatacggagtatccggagacgtcatctgttctccgtgtggtctcggaacatattctcacaccgtctcttccgcagataaatgcgaacccgtacccagaaatacgtttaactatatcgatgtggaaattaacctgtatccagttaacgacacgtcgtgtactcggacgaccactaccggtctcagcgaatccatctcaacgtcggaactaactattactatgaatcataaagactgtaatcccgtatttcgtgatggatacttctccgttcttaataaggtagcgacttcaggtttctttacaggagaaaggtgtgcactctgaatttcgagattaaatgcaataacaaagattcttcctccaaacagttaacgaaagcaaagaatgatactatcatgccgcattcggagacagtaactctagtgggcgacatctatatactatatagtaataccaatactcaagactacgaaactgatacaatctcttatcatgtgggtaatgttctcgatgtcgatagccatatgcccggtagttgcgatatacataaactgatcactaattccaaacccacccactttttatagtaagtttttcacccataaataataaatacaataattaatttctcgtaaaagtagaaaatatattctaatttattgcacggtaaggaagtagaatcataaagaacagtactcaatcaatagcaattatgaaacaatatatcgtactggcatgcatgtgcctggcggcagctgctatgcctgccagtcttcagcaatcatcctcatcctcctcctcgtgtacggaagaagaaaacaaacatcatatgggaatcgatgttattatcaaagtcacaaagcaagaccaaacaccgaccaatgataagatttgccaatccgtaacggaaattacagagtccgagtcagatccagatcccgaggtggaatcagaagatgattccacatcagtcgaggatgtagatcctcctaccacttattactccatcatcggtggaggtctgagaatgaactttggattcaccaaatgtcctcagattaaatccatctcagaatccgctgatggaaacacagtgaatgctagattgtccagcgtgtccccaggacaaggtaaggactctcccgcgatcactcatgaagaagctcttgctatgatcaaagactgtgaagtgtctatcgacatcagatgtagcgaagaagagaaagacagcgacatcaagacccatccagtactcgggtctaacatctctcataagaaagtgagttacgaagatatcatcggttcaacgatcgtcgatacaaaatgcgtcaagaatctagagtttagcgttcgtatcggagacatgtgcaaggaatcatctgaacttgaggtcaaggatggattcaagtatgtcgacggatcggcatctgaaggtgcaaccgatgatacttcactcatcgattcaacaaaactcaaagcgtgtgtctgaatcgataactctattcatctgaaattggatgagtagggttaatcgaacgattcaggcacaccacgaattaaaaaagtgtaccggacactatattccggtttgcaaaacaaaaatgttcttaactacattcacaaaaagttacctctcgcgacttcttctttttctgtctcaatagtgtgatacgattatgacactattcctattcctattcctatttcctttcagagtatcacaaaaatattaaacctctttctgatggtctcataaaaaaagttttacaaaaatatttttattctctttctctctttgatggtctcataaaaaaagttttacaaaaatatttttattctctttctctctttgatggtctcataaaaaaagttttacaaaaatatttttattctctttctctctttgatggtctcataaaaaaagttttacaaaaatatttttattctctttctctctttgatggtctcataaaaaaagttttacaaaaatatttttattctctttctctctttgatggtctcataaaaaaagttttacaaaaatatttttattctctttctctctttgatggtctcataaaaaaagttttacaaaaatatttttattctctttctctctttgatggtctcataaaaaaagttttacaaaaatatttttattctctttctctctttgatggtctcataaaaaaagttttacaaaaatatttttattctctttct

SEQ ID NO: 6 - DNA, 188863 bp, Artificial Sequence
  LIVP 5.1.1
cgattaaaactttttttatgagaccatcaaagagagaaagagaataaaaatatttttgtaaaactttttttatgagaccatcaaagagagaaagagaataaaaatatttttgtaaaactttttttatgagaccatcaaagagagaaagagaataaaaatatttttgtaaaactttttttatgagaccatcaaagagagaaagagaataaaaatatttttgtaaaactttttttatgagaccatcaaagagagaaagagaataaaaatatttttgtaaaactttttttatgagaccatcaaagagagaaagagaataaaaatatttttgtaaaactttttttatgagaccatcaaagagagaaagagaataaaaatatttttgtaaaactttttttatgagaccatcaaagagagaaagagaataaaaatatttttgtaaaactttttttatgagaccatcaaagagagaaagagaataaaaatatttttgtaaaactttttttatgagaccatcaaagagagaaagagaataaaaatatttttgtaaaactttttttatgagaccatcaaagagagaaagagaataaaaatatttttgtaaaactttttttatgagaccatcaaagagagaaagagaataaaaatatttttgtaaaactttttttatgagaccatcaaagagagaaagagaataaaaatatttttgtaaaactttttttatgagaccatcaaagagagaaagagaataaaaatatttttgtaaaactttttttatgagaccatcaaagagagaaagagaataaaaatatttttgtaaaactttttttatgagaccatcaaagagagaaagagaataaaaatatttttgtaaaactttttttatgagaccatcaaagagagaaagagaataaaaatatttttgtaaaactttttttatgagaccatcaaagagagaaagagaataaaaatatttttgtaaaactttttttatgagaccatcagaaagaggtttaatatttttgtgatactctgaaaggaaataggaataggaataggaatagtgtcataatcgtatcacactattgagacagaaaaagaagaagtcgcgagaggtaactttttgtgaatgtagttaagaacatttttgttttgcaaaccggaatatagtgtccggtacacttttttaattcgtggtgtgcctgaatcgttcgattaaccctactcatccaatttcagatgaatagagttatcgattcagacacacgctttgagttttgttgaatcgatgagtgaagtatcatcggttgcaccttcagatgccgatccgtcgacatacttgaatccatccttgacctcaagttcagatgattccttgcacatgtctccgatacgaacgctaaactctagattcttgacgcattttgtatcgacgatcgttgaaccgatgatatcttcgtaactcactttcttatgagagatgttagacccgagtactggatgggtcttgatgtcgctgtctttctcttcttcgctacatctgatgtcgatagacacttcacagtctttgatcatagcaagagcttcttcatgagtgatcgcgggagagtccttaccttgtcctggggacacgctggacaatctagcattcactgtgtttccatcagcggattctgagatggatttaatctgaggacatttggtgaatccaaagttcattctcagacctccaccgatgatggagtaataagtggtaggaggatctacatcctcgactgatgtggaatcatcttctgattccacctcgggatctggatctgactcggactctgtaatttccgttacggattggcaaatcttatcattggtcggtgtttggtcttgctttgtgactttgataataacatcgattcccatatgatgtttgttttcttcttccgtacacgaggaggaggatgaggatgattgctgaagactggcaggcatagcagctgccgccaggcacatgcatgccaggacgatatattgtttcataattgctattgattgagtactgttctttatgattctacttccttaccgtgcaataaattagaatatattttctacttttacgagaaattaattattgtatttattatttatgggtgaaaaacttactataaaaagtgggtgggtttggaattagtgatcagtttatgtatatcgcaactaccgggcatatggctatcgacatcgagaacattacccacatgataagagattgtatcagtttcgtagtcttgagtattggtattactatatagtatatagatgtcgcccactagagttactgtctccgaatgcggcatgatagtatcattctttgctttcgttaactgtttggaggaagaatctttgttattgcatttaatctcgaaattcagagtgcacacctttctcctgtaaagaatcctgaagttgctaccttattaagaacggagaagtatccatcacgaaagacgggattacagtctttatgattcatagtaatagttagttccgacgttgagatggattcgctgagaccggtagtggtcgtccgagtacacgacgtgtcgttaactggatacaggttaatttccacatcgatatagttaaacgtatttctgggtacgggttcgcatttatctgcggaagagacggtgtgagaatatgttccgagaccacacggagaacagatgacgtctccggatactccgtatcctattccacattttgtttgggaaacacatgccttgcatccggatgatcctttgagaagacaataatatccgggagagcattcacagattctattgtgagtcgtgttacacgatcgcgtcttccgttacaacttagacaagcgggtaaatgattattgcgagatgtgaaggtacccgaaccacacggcgtacatcgtgtgttagtcttgctatcgcataatctggaagcgtatgttcccggacacaaattatggcgtttgtattcgttgtctttacactttccatcggatggtgcatgcggtgctatatctcttccgtttattattatacatgagagaaacaatatatacgagtataatacggacttcatgatttaataatgtagtaatcgttgtcttgttcctgtttcctacttctccaatcatatagatattttctttctatcatggataatatttgtaatggttctttccgtacaacatactgtttagatgatattgcgcataatttccggaggcaaatacgatagtctagattgaccgatggtagactctaatttattgagtgctttgtcgacgagtttacttttacgctccatcgatagatggcactgttctatgagatcgtcgtacatgggaaatgaaatgtgactgtctgaatgtatggctttaagatagctgtgataccgtatacaggtcggtgtcggagattcgaatctctttgaggcgacttatgtcacgatgatggaatctatcttatcgaatgatatatttttcataaatacacttttatagtcctcgtttaaacagaatttactatgtagttccgcgaatgactcgtcccttaataggcagtaggctagtatcttttttacgtagtaatcgtcgtagggagagacatcttgtagaacaacgatttaatcataggtagagatactttcagtctgtggtggatgatgtcattcacaacatccgccttgtatatgatgtttctgttttcaaacaccaagtcgaataccgtctttagtcggaaggttgatgtcgtatccgatgtatgaggcaacattgttgttacaattttgaaaggcggtattatagtattcgtctttctgaatgtcgaacctatctaatagataccgtagtatattgagagtgtatccttgattatgttttatgaatagataaagtagatgttgtccttcttccttttgttcgtgccaattgagtaacattatgagaatatgacctgttgcacaatcgttccatgatgggtgtacaatcaagattattacgtatcctcgtatcggctcctcgagataaaagagcatacaccacacgaggactatgtttggtatactgttgaaggtaagtgtgtaaccgcgttaatgtttgctccataatctattatcgcgtagatgaatcgcttctcggctcgcatcttagtgtgacttaacttgtaataattgctttcgtagaacgtggatatgtgtttacagtagtaatgaagagaagtgagttcatcctcgtcggcgcaattagggtcggatcctttgtacagaacgtaatagtttaagctcccattgaatttatatctaagataacacagcaatagatcggatgatttactaaagtcatcaatggtgtccgttagtatatcaaagatcttgttatcgattgatagtggtcatccttgctatcaaagttacgcatgccgtggtgtaacaatatctttaatacagatggattaaatcgtgtattcatcgtatagcaatgtaatggagagttacctcgtttattcagatcgcagtgtttaataactagcttaaacagatgagacgatgtatccacatcaaagaacgtaaaatacatatgacagacattgttgacagaaacgtgaccttcattcttaccgtcgtccataaatacgttaggtatgtaccacatactgtcgcgaacgatgcgtacaatctcgtccatctcataatgatttactttttcataattaaagatgtgaaagaaaaacagaacaatatatttttttagtaatgtttatgcgagacatataaaataaactccgtgtttatgatgccggtaaatgtttttatcatcttggacggaatcgattttgtaatatgtcatggaaacaaatgaaacaggacattatcgctccatgataaattatttaatggagtaataaagtatctccatgggtaatttcgaaatcaagttatcgtctgtattaatgttgtccactatggagtcgatcctctcattgttctttacagtttctgtaatgatggacgttagttcttttttgtaccatttgatgtcggattctttgcgtatctcaatttgtggcgtttgcttcgtttaaagaatatatcaaacatggagacgcctgatatgtagacattcttcattctattaatgtctactctatagcgctttagttccttatgacgaccggagatatcatactttactttagaaggaaaatcatcatctaggattaaggcgtatctgatacaggcgaataatggttcaggatatagatagcgtatatctctattaaatgcgtcaatcatagtctctagagtgggatggtagctaagtaataaatcaactatcctcgttttgttttctctttggtaactgcttttctggatggccgtattgattatcgagcgtgacactcgctccatattccaataaccgctttgcaaattgtatattattgacatcgaccgcgtaatatagtagagttatcgatcatatctatatcatccatgtacttgcttagtatatcaaatacatctatcagtatggtttcataacagtgatacccgcaattattaaatctcgataatatcagaccgtacatacatagacggccattgttagatatgtgatttacagccgcgtgtccatattttccacgataaaccttacgacgtttacatcgacgagattattattaacaaagtagtcgtgtagaggatagttgttgtccgtcgtcttatccatggttgctccgttatccaacatgcattgaatgataggtatacttaccatatcgccgtaatgtaagtagtttatcaacatggcttgtacatcctgttgtctaaatctctttagaatgttatcgatgatgtagtggttatattctctggaatcgtacgaagtaatactacgcattacgtcgacaagagtatgacgtctctcaataagaagattaacgatttccatgtctacattatatggggttactctaaatcgcttgtttagataatacgcctctaatatagggctgacgtcgtatactctacacgtgtccacatcctttattaataatttaacaatctctatatctatggttgagcaagaccagtagtattggatgggtaaagatcctccttcgtctctgccatggatggaaacattgttatcgatcaaacatttaattacatccttggatagagattgagattctctatgagacgatatatagtaatgaagagagttcttacacatatcactgtcgtacatacaggtacgaaatacgtaaccggtgctgtaacattctgatttaagaagccatagcaatacttctggtctcggattaggcgtcgttacgtatatatccaccaatccgagaccattgattgcataattcgtattcttggacggacgtatccgtttatccacaattaggtattttagcagacgtaagtcgatattatccgaatacagatcgaaatcatttatattcgacttgagttcgttagaggaattcgaatagctggatatcagtagatgcacaatctgagatttgacgtatctatgcttactgtatgctcctagcggagttaatccttcgttgtttctacaaagtctctcgactccgcgagagagtaacagccgaacaatcttaatgtctgtatcgcatttattgaagacgtaacaatgtagcgcattgtttcctcgtctatctatatgttttgataagttgtgacacgtttcaatctctggttttatttttttgtacgtcacatcttcatccagtagacgacatagaatagtgcactctctaccacaataatccatagctattctggtgctaattattcctatttcacgaaggcaatcattcctcataagatgataaaaagtgtagtgagagagcatgaaggagatttagtatttagcagtgcggatatgatccaagagggtgagatagtcgttctcgttcagaatctttcgcagcataagtagtatgtcgatatacttatcgttgaagactctttataaaagtctatttgtttatatttattgcggatagcagtatttccctataaaaagtatacgtcctgtggtgtctttaatcatgtacatgaatggatggtttatgtagaccttcgtacgatataccatcgaaaagttaatcgtaaatactcctgtaacggccgatgcttctgtatactcctcattaacatctataaacgtcgtatgtagaaatttttctacagtgatagtttcattacacatcttgctaaaatctgcataatatccgaatatattagtaagtcctaaattttctaaaatcggtaccagattatacggttctgtcatttccactttaaactttggcatatacaagtctatacttttagtagataacataccacaccattttttaaatttttcatctgttatatttttttctatgttatatataccttctatgtcgtccggtagtataattaccatactagagtttccctcgtatggaatatcgataatagagaatcctccgaataattcattaatatgtacatattgcaagttattctcggtacccaccatcatatcaacgctggtaactatattcttagaaatataaaacttgtctgtatatgtaagatgtttagaaaatggatatttccacattgctttaaaatggacggcgctaacaactgtcatacgagtattaatggatagcggactagtcaataaggaattaattttaccatttgtcattgtcttaacccattcgttgattagttcctttgtttggttagcattattaaagtttacagtttgaaaatcgtcttttattttttgtaggaaggaggcgtggaactcgatactatcgctaccgtatattttatttgcggtagctagtgtcgcacaatacggaatatctacctccatgtcatcattattgtcatcgggtgtattctcattcatattctctatatattttgatagttgttcagctgtagaaccagctgctccatgatttagaatagataaagtagataaaatggaaactggagaaatcaaaacattttcatcagggtgttttaagattagttctttaaagatatccatggtatagacctaacgataacgatatatatcataaataaataatgttaaatttcaatttatgtttgtaccccgtattcatacttaacaaattggtattgcgtacacaatcaatcatattacataccattaataatgcaagcataaaaaattgttagtagatgtttctaaatataggttccgtaagcaaagaatataagaatgaagcggtaatgataaaatcaatcgttatctaaaatgatcatactcatttattttattctattatattaacacatacatttttaacagcaacacattcaatattgtattgttatttttatattatttacacaattaacaatatattattagtttatattactgaattaataatataaaattcccaatcttgtcataaacacacactgagaaacagcataaacacagaatccatcaaaaatgttgataaattatctgatgttgttgttcgctgctatgataatcagatcattcgccgatagtggtaacgctatcgaaacgacattgccagaaattacaaacgctacaacagatattccagctatcagattatgcggtccagagggagatggatattgtttacacggtgactgtatccacgctagagatattgacggtatgtattgtagatgctctcatggttatacaggcattagatgtcagcatgtagtattagtagactatcaacgttcagaaaacccaaacactacaacgtcatatatcccatctcccggtattatgcttgtattagtaggcattattatgtgttgtctattatctgtttataggttcactcgacgaactaaactacctatacaagatatggttgtgccataatttttataaatttttttatgagtatttttacaaaaatgtataaagtgtatgtcttatgtatatttataaaaatgctaagtatgcgatgtatctatgttatttgtatttatctaaacaatacctctacctctagatattatacaaaaattttttatttcggcatattaaagtaaaatctagttaccttgaaaatgaatacagtgggtggttccgtatcaccagtaagaacataatagtcaaatacagtatccgattgagattttgcatacaatactagtctagaaagaaatttgtaatcatcttctgtgacgggagtccatatatctgtatcatcgtctagtttatcagtgtcccatgctatattcctgttatcatcattagttaatgaaaataactctcgtgcttcagaaaagtcaaatattgtatccatacatacatctccaaaactatcgcttatacgtttatctttaacgatacctatacctagatggttatttactaacagacattttccagatctattgactataactcctatagtttccacatcaaccaagtaatgatcatctattgttatataacaataacataactcttttccatttttatcagtatgtatatctatatcaacgtcgtcgttgtagtgaatagtagtcattgatctattatatgaaacggatatgtctagaacggcaattgttttacgtccagttaacactttcgttgatttaaagtctagagtctttgcaaacataatatccttatccgactttatatttcctgtagggtggtataattttattttgcctccacatatcggtgtttccaaatatattactagacaatattccatatagttattagttaagggtacccaattagaacacgtacgcttattatcatcatttggatcgtatttcataaaagttattgtgttatcgatgtcaacacattctacattttttaatcgtctatatagtatttttctgatattttctataatatcagaattgtcttccatcggaagttgtatactatcggaatcagttacatgtttaaataattctctgatgtcattccttatacaatcaaattcattattaaacagtttaatagtctgtagacctttatcgtcgtaaatatccattgtcttattagttacgcttatttttatgtgtttttacgttgctttattatattttataagaatgattgtttgacgaatcacgagaactattaagacacattattaggtatatattataaaaaagtttttgattacgatgttataagaggaaagaggacacattaacatcatacatcaattaactacattcttataacatcgtaatcaaaagaattgcaattttgatgtataacaactgtcaatgggttatggaattgtatattacatattatacggtatgttggtaacgacaaataccggtcggtaattgtctgccggtgtaatagaattatatatatctatctattacaccggccttgtatacataataataagttgtggtagtatgatctccatatttataatttaggactttgtattcagtatttttggaatcataaaaaataaaaaaaagttttactaatttaaaatttaaaaagtatttacatttttttcactgtttagtcgcggatatggaattcgatcctgccaaaatcaatacatcatctatagatcatgtaacaatattacaatacatagatgaaccaaatgatataagactaacagtatgcattatccgaaatattatatcaatatcacaaaaataaatacacatttggctaatcaatttcgggcttggaaaaaacgtatcgccggaagggactatatgactaacttatctagagatacaggaatacaacaatcaaaacttactgaaactatacgtaactgtcaaaaaaatagaaacatatatggtctatatatacactacaatttagttattaattggataaccgatgtgattatcaatcaatattaagagggttggtaaattggtacatagctaataatacctatacacccaataatacaacaaccatttctgagttggatatcatcaaaatactaaataaatacgaggacgtgtatagagtaagtaaagaaaaagaatgtggaatttgctatgaagttgtttactcaaaacgatagatactttggtttattggattcgtgtactcatatattttgcataacatgcatcaatatatggcatagaacacgaagagaaaccggtgcgtcggataattgtcctatatgccgtacccgttttagaaacataacaatgagcaagttctataagctagttaactaataaataaaaagtttaatttgttgacgacgtatgtcgttattttttctcgtataaaagattaaattcaattcaattcgttgtttctaatataatctgccgtattggatggattctcaagacaattgcatttagattatattatcatgaataaaaatagtagcacacaactacttcagcaaacattctttttataaatgccatctagcgtagcgaggacacaagtgaacctataattatcaaatttattagtatcggttacatgaaggactttacgtagagtgacgattccactatctgtggtacgaacggtttcatcttctttgatgccatcacccagatgttctataaacttggtatcctcgtccgatttcatatcctttgccaaccaatacatatagctaaactcaggcatatgttccacacatcctgaacaatgaaattctccagaagatgttacaatgtctagatttggacatttggtttcaaccgcgttaacatatgagtgaacacacccatacatgaaagcgatgagaaataggattctcatcttgccaaaatatcactagaaaaaatttatttatcagttttaaaggtataaaaaatacttattgttgctcgaatattttgtatttgatggtatacggaagattagaaatgtaggtattatcatcaactgattctatggttttatgtattctatcatgtttcactattgcgttggaaataatatcatatgcttccacatatattttattttgttttaactcataatactcacgtaattctggattattggcatatctatgaataattttagctccatgatcagtaaatattaatgagaacatagtattaccacctaccattatttttttcatctcattcaattcttaattgcaaagatctatataatcattatagcgttgacttatggactctggaatcttagacgatgtacagtcatctataatcatggcatatttaatacattgttttatagcatagtcgttatctacgatgttagatatttctctcaatgaatcaatcacacaatctaatgtaggtttatgacataatagcattttcagcagttcaatgtttttagattcgttgatggcaatggctatacatgtatatccgttatttgatctaatgttgacatctgaaccggattctagcagtaaagatactagagattgtttattatatctaacagccttgtgaagaagtgtttctcctcgtttgtcaatcatgttaatgtctttaagataaggtaggcaaatgtttatagtactaagaattgggcaagcataagacatgtcacaaagacccttttttgtatgtataagtgtaaaaattataacatccatagttggatttacataggtgtccaatcgggatctctccatcatcgagataattgatggcatctcccttccttttttagtagatatttcatcgtgtaagaatcaatattaatatttctaaagtatccgtgtatagcctctttatttaccacagctccatattccactagagggatatcgccgaatgtcatatactcaattagtatatgttggaggacatccgagttcattgttttcaatatcaaagagatggtttccttatcatttctccatagtggtacaatactacacattattccgtgcggctttccattttccaaaaacaatttgaccaaatctaaatctacatctttattgtatctataatcactatttagataatcagccataattcctcgagtgcaacatgttagatcgtctatatatgaataagcagtgttatctattcctttcattaacaatttaacgatgtctatatctatatgagatgacttaatataatattgaagagctgtacaatagtttttatctataaaagacggcttgattccgtgattaattagacatttaacaacttccggacgcacatatgctctcgtatccgactctgaatacagatgagagatgatatacagatgcaatacggtaccgcaatttcgtagttgataatcatcatacgcgtatcagtactcgtcctcataaagaacactgcagccattttctatgaacaaatcaataattttagaaacaggatcattgtcattacataattttctataactgaacgatggttttcacatttaacactcaagtcaaatccatgttctaccaacacctttatcaagtcaacgtctacatttttggatttcatatagctgaatatattaaagttatttatgttgctaaatccagtggcttctagtagagccatcgctatatccttattaactttaacatgtctactatttgtgtattcttctaatggggtaagctgtctccaatttttgcgtaatggattagtgccactgtctagtagtagtttgacgacctcgacattattacaatgctcattaaaaaggtatgcgtgtaaagcattattcttgaattggttcctggtatcattaggatctctgtctttcaacatctgtttaagttcatcaagagccacctcctcattttccaaatagtcaaacattttgactgaatgagctactgtgaactctatacacccacacaactaatgtcattaaatatcatgtcaaaaacttgtacaattattaataaaaataatttagtgtttaaattttaccagttccagattttacacctccgttaatacctccattaaccccactggacgatcctcctccccacattccaccgccaccagatgtataagttttagatcctttattactaccatcatgtccatggataaagacactccacatgccgccactaccccctttagaagacatattaataagacttaaggacaagtttaacaataaaattaatcacgagtaccctactaccaacctacactattatatgattatagtttctatttttacagtaccttgactaaagtttctagtcacaagagcaatactaccaacctacactattatatgattatagtttctatttttataggaacgcgtacgagaaaatcaaatgtctaatttctaacggtagtgttgataaacgattatcgtcaatggatacctcctctatcatgtcgtctattttcttactttgttctattaacttattagcattatatattatttgattataaaacttatattgcttattagcccaatctgtaaatatcggattattaacatatcgtttctttgtaggtttatttaacttgtacatcactgtaagcatgtccttaccatttattttaatttgacgcatatccgcaatttctttttcgcagtcggttataaattctatatatgatggatacatgctacatgtgtacttataatcgactaatatgaagtacttgatacatattttcagtaacgatttattattaccacctatgaataagtacctgtgatcgtctaggtaatcaactgttttcttaatacattcgatggttggtaatttactcagaataatttccaatatcttaatatataattctgctatttctgggatatatttatctgccagtataacacaaatagtaatacatgtaaacccatattttgttattatattaatgtctgcgccattatctattaaccattctactaggctgacactatgcgactcaatacaatgataaagtatactacatccatgtttatctattttgtttatatcattaatatacggcttacaaagttttagtatcgataacacatccaactcacgcatagagaaggtagggaataatggcataatatttattaggttatcatcattgtcattatctacaactaagtttccattttttaaaatatactcgacaactttaggatctctattgccaaatttttgaaaatatttatttatatgcttaaatctatataatgtagctccttcatcaatcatacatttaataacattgatgtatactgtatgataagatacatattctaacaatagatcttgtatagaatctgtatatcttttaagaattgtggatattaggatattattacataaactattacacaattctaaaatataaaacgtatcacggtcgaataatagttgatcaactatataattatcgattttgtgatttttcttcctaaactgtttacgtaaatagttagatagaatattcattagttcatgaccactatagttactatcgaataacgcgtcaaatatttcccgtttaatatcgcatttgtcaagataataatagagtgtggtatgttcacgataagtataataacgcatctctttttcgtgtgaaattaaatagtttattacgtccaaagatgtagcataaccatcttgtgacctagtaataatataataatagagaactgttttacccattctatcatcataatcagtggtgtagtcgtaatcgtaatcgtctaattcatcatcccaattataatattcaccagcacgtctaatctgttctattttgatcttgtatccatactgtatgttgctacatgtaggtattcctttatccaataatagtttaaacacatctacattgggatttgatgttgtagcgtatttttctacaatattaataccatttttgatactatttatttctatacctttcgaaattagtaatttcaataagtctatattgatgttatcagaacatagatattcgaatatatcaaaatcattgatatttttatagtcgactgacgacaataacaaaatcacaacatcgtttttgatattattatttttcttggtaacgtatgcctttaatggagtttcaccatcatactcatataatggatttgcaccactttctatcaatgattgtgcactgctggcatcgatgttaaatgttttacaactatcatagagtatcttatcgttaaccatgattggttgttgatgctatcgcattttttggtttctttcatttcagttatgtatggatttagcacgtttgggaagcatgagctcatatgatttcagtactgtagtgtcagtactattagtttcgatcagatcaatgtctagatctatagaatcaaaacacgataggtcagaagataatgaatatctgtacgcttctttttgtactgtaacttctggttttgttagatggttgcatcgtgctttaacgtcaatggtacaaattttatcctcgctttgtgtatcatattcgtccctactataaaattgtatattcagattatcatgcgatgtgtatacgctaacggtatcaataaacggagcacaccatttagtcataaccgtaatccaaaaatttttaaagtatatcttaacgaaagaagttgtgtcattgtctacggtgtatggtactagatcctcataagtgtatatatctagagtaatgtttaatttattaaatggttgataatatggatcctcgtgacaatttccgaagatggaaataagacataaacacgcaataaatctaattgcggacatggttactccttaaaaaaatacgaataatcaccttggctatttagtaagtgtcatttaacactatactcatattaatccatggactcataatctctatacgggattaacggatgttctatatacggggatgagtagttctcttctttaactttatactttttactaatcatatttagactgatgtatgggtaatagtgtttgaagagctcgttctcatcatcagaataaatcaatatctctgtttttttgttatacagatgtattacagcctcatatattacgtaatagaacgtgtcatctaccttattaactttcaccgcatagttgtttgcaaatacggttaatcctttgacctcgtcgatttccgaccaatctgggcgtataatgaatctaaactttaattgcttgtaatcattcgaaataatttttagtttgcatccgtagttatcccctttatgtaactgtaaatttctcaacgcgatatctccattaataatgatgtcgaattcgtgctgtatacccatactgaatggatgaacgaataccgacggcgttaatagtaatttactttttcatctttacatattgggtactagttttactatcataagtttataaattccacaagctactatggaataagccaaccatcttagtataccacacatgtcttaaagtttattaattaattacatgttgttttatatatatcgctacgaatttaaagagaaattagtttaggaagaaaaattatctatctacatcatcacgtctctgtattctacgatagagtgctactttaagatgcgacagatccgtgtcatcaaatatatactccattaaaatgattattccggcagcgaacttgatattggatatatcacaacctttgttaatatctacgacaatagacagcagtcccatggttccataaacagtgagtttatctttctttgaagagatattttgtagagatcttataaaactgtcgaatgacatcgcatttatatctttagctaaatcgtatatgttaccatcgtaatatctaaccgcgtctatcttaaacgtttccatcgctttaaagacgtttccgatagatggtctcatttcatcagtcatactgagccaacaaatataatcgtgtataacatctttgatagaatcagactctaaagaaaacgaatcggctttattatacgcattcatgataaacttaatgaaaaatgtttttcgttgtttaagttggatgaatagtatgtcttaataattgttattatttcattaattaatatttagtaacgagtacactctataaaaacgagaatgacataactaatcataactagttatcaaagtgtctaggacgcgtaattttcatatggtatagatcctgtaagcattgtctgtattctggagctattttctctatcgcattagtgagttcagaatatgttataaatttaaatcgaataacgaacataactttagtaaagtcgtctatattaactcttttattttctagccatcgtaataccatgtttaagatagtatattctctagttactacgatctcatcgttgtctagaatatcacatactgaatctacatccaattttagaaattggtctgtgttacatatctcttctatattattgttgatgtattgtcgtagaaaactattacgtagaccattttctttataaaacgaatatatagtactccaattatctttaccgatatatttgcacacataatccattctctcaatcactacatctttaagattttcgttgttaagatatttggctaaactatataattctattagatcatcaacagaatcagtatatatttttctagatccaaagacgaactctttggcgtcctctataatattcccagaaaagatattttcgtgttttagtttatcgagatctgatctgttcatatacgccatgattgtacggtacgttatgataaccgcataaaataaaaatccattttcatttttaaccaatactattcataattgagattgatgtaatactttgttactttgaacgtaaagacagtacacggatccgtatctccaacaagcacgtagtaatcaaatttggtgttgttaaacttcgcaatattcatcaatttagatagaaacttatactcatcatctgttttaggaatccatgtattattaccactttccaacttatcattatcccaggctatgtttcgtccatcatcgttgcgcagagtgaataattcttttgtattcggtagttcaaatatatgatccatgcatagatcggcaaagctattgtagatgtgatttttcctaaatctaatataaaactcgtttactagcaaacactttcctgatttatcgaccaagacacatatggtttctaaatctatcaagtggtggggatccatagttatgacgcagtaacatatattattacattcttgactgtcgctaatatctaaatatttattgttatcgtattggattctgcatatagatggcttgtatgtcaaagatatagaacacataaccaatttatagtcgcgctttacattctcgaatctaaagttaagagatttagaaaacattatatcctcggatgatgttatcactgtttctggagtaggatatattaaagtctttacagatttcgtccgattcaaataaatcactaaataatatcccacattatcatctgttagagtagtatcattaaatctattatattttatgaaagatatatcactgctcacctctatatttcgtacatttttaaactgtttgtataatatctctctgatacaatcagatatatctattgtgtcggtagacgataccgttacatttgaattaatggtgttccattttacaacttttaacaagttgaccaattcatttctaatagtatcaaactctccatgattaaatattttaatagtatccattttatatcactacggacacaaagtagctgacataaaccattgtataatttttatgttttatgtttattagcgtacacattttggaagttccggcttccatgtatttcctggagagcaagtagatgatgaggaaccagatagtttatatccgtacttgcacttaaagtctacattgtcgttgtatgagtatgatcttttaaacccgctagacaagtatccgtttgatattgtaggatgtggacatttaacaatctgacacgtgggtggatcggaccattctcctcctgaacacaggacactagagttaccaatcaacgaatatccactattgcaactataagttacaacgcttccatcggtataaaaatcctcgtatccgttatgtcttccgttggatatagatggaggggattggcatttaacagattcacaaataggtgcctcgggattccataccatagatccagtaaatcctaattcacaatacgatttagattcaccgatcaactgatatccgctattacaagagtacgttatactagagccaaagtctactccaccaatatcaagttggccattatcgatatctcgaggcgatgggcatctccgtttaatacattgattaaagagtgtccatccagtacctgtacatttagcatatataggtcccattttttgctttctgtatccaggtagacatagatattctatagtgtctcctatgttgtaattagcattagcatcagtctccacactattcttaaatttcatattaatgggtcgtgacggaatagtacagcatgatagaacgcatcctattcccaacaatgtcaggaacgtcacgctctccaccttcatatttatttatccgtaaaaatgttatcctggacatcgtacaaataataaaaagcccatatatgttcgctattgtagaaattgtttttcacagttgctcaaaaacgatggcagtgacttatgagttacgttacactttggagtctcatctttagtaaacatatcataatattcgatattacgagttgacatatcgaacaaattccaagtatttgattttggataatattcgtattttgcatctgctataattaagatataatcaccgcaagaacacacgaacatctttcctacatggttaaagtacatgtacaattctatccatttgtcttccttaactatatatttgtatagataattacgagtctcgtgagtaattccagtaattacatagatgtcgccgtcgtactctacagcataaactatactatgatgtctaggcatgggagacttttttatccaacgatttttagtgaaacattccacatcgtttaatactacatatttctcatacgtggtataaactccacccattacatatatatcatcgtttacgaataccgacgcgcctgaatatctaggagtaattaagtttggaagtcttatccatttcgaagtgccgtgtttcaaatattctgccacacccgttgaaatagaaaattctaatcctcctattacatataactttccatcgttaacacaagtactaacttctgattttaacgacgacatattagtaaccgttttccattttttcgttttaagatctacccgcgatacggaataaacatgtctattgttaatcatgccgccaataatgtatagacaattatgtaaaacatttgcattatagaattgtctatctgtattaccgactatcgtccaatattctgttctaggagagtaatgggttattgtggatatataatcagagtttttaatgactactatattatgttttataccatttcgtgtcactggctttgtagatttggatatagttaatcccaacaatgatatagcattgcgcatagtattagtcataaacttgggatgtaaaatgttgatgatatctacatcgtttggatttttatgtatccactttaataatatcatagctgtaacatcctcatgatttacgttaacgtcttcgtgggataagatagttgtcagttcatcctttgataattttccaaattctggatcggatgtcaccgcagtaatattgttgattatttctgacatcgacgcattatatagttttttaattccatatcttttagaaaagttaaacatccttatacaatttgtgaaattaatattatgaatcatagtttttacacatagatctactacaggcggaacatcaattattatggcagcaactagtatcatttctacattgtttatggtgatgtttatcttcttccagcgcatatagtctaatagcgattcaaacgcgtgatagtttataccattcaatataatcgcttcatcctttagatggtgatcctgaatgcgtttaaaaaaattatacggagacgccgtaataatttccttattcacttgtataatttccccattgatagaaaatattacgctttccattcttaaagtactataagtaattatagtataatgtaaacgtttatatattcaatatttttataaaaatcattttgacattaattcctttttaaatttccgtctatcatctatagaaacatattctatgaatttataaaatgcttttacgtgtcctatcgtaggcgatagaaccgctaaaaagcctatcgaatttctacaaaagaatctgttatatggtatagggagagtataaaacattaaatgtccgtacttattaaagtattcagtagccaatcctaactctttcgaatacttattaatggctcttgttctgtacgaatctatttttttgaacaacggacctagtggtatatcttgttctatgtatctaaaataatgtctgactagatccgttagtttaatatccgcagtcatcttgtctagaatggcaaatctaactgcgggtttaggctttagtttagtttctatatctacatctatgtctttatctaacaccaaaaatataatagctaatattttattacaatcatccggatattcttctacgatctcactaactaatgtttctttggttatactagtatagtcactatcggacaaataaagaaaatcagatgatcgatgaataatacatttaaattcatcatctgtaagatttttgagatgtctcattagaatattattagggttagtactcattatcattcggcagctattacttattttattatttttcaccatatagatcaatcattagatcatcaaaatatgtttcaatcatcctaaagagtatggtaaatgactcttcccatctaatttctgaacgttcaccaatgtctctagccactttggcactaatagcgatcattcgcttagcgtcttctatattattaactggttgattcaatctatctagcaatggaccgtcggacagcgtcattctcatgttcttaatcaatgtacatacatcgccgtcatctaccaattcatccaacaacataagctttttaaaatcatcattataataggtttgatcgttgtcatttctccaaagaatatatctaataagtagagtcctcatgcttagttaacaactattttttatgttaaatcaattagtacaccgctatgtttaatacttattcatattttagtttttaggattgagaatcaatacaaaaattaatgcatcattaattttagaaatacttagtttccacgtagtcaatgaaacatttgaactcatcgtacaggacgttctcgtacaggacgtaactataaaccggtttatatttgttcaagatagatacaaatccgataactttttttacgaattctacgggatccactttaaaagtgtcataccgggttctttttatttttttaaacagatcaatggtgtgatgttgattaggtcttttacgaatttgatatagaatagcgtttacatattctccataatggtcaatcgccatttgttcgtatgtcataaattctttaattatatgacactgtgtattatttagttcatccttgttcattgttaggaatctatccaaaatggcaattatactagaactataggtgcgttgtatacacatattgatgtgtctgtttatacaatccatgatatttggatccatgctactaccttcgggtaaaattgtagcatcatataccatttctagtactttaggttcattattatccattgcagaggacgtcatgatcgaatcataaaaaaatatattatttttatgttattttgttaaaaataatcatcgaatacttcgtaagatactccttcatgaacataatcagttacaaaacgtttatatgaagtaaagtatctacgatttttacaaaagtccggatgcataagtacaaagtacgcgataaacggaataataatagatttatctagtctatctttttctatagctttcatagttagatacatggtctcagaagtaggattatgtaacatcagcttcgataaaatgactgggttatttagtcttacacattcgctcatacatgtatgaccgttaactacagagtctacactaaaatgattgaacaatagatagtctaccattgtttcgtattcagatagtacagcgtagtacatggcatcttcacaaattatatcattgtctaatagatatttgacgcatcttatggatcccacttcaacagccattttaaaatcggtagaatcatattgctttcctttatcattaataatttctagaacatcatctctatcataaaagatacaaatattaactgtttgatccgtaataacattgctagtcgatagcaatttgttaataagatgcgctgggctcaatgtcttaataagaagtgtaagaggactatctccgaatttgttttgtttattaacatccgttgatggaagtaaaagatctataatgtctacattcttgactgttttagagcatacaatatggagaggtgtatttccatcatgatctggttttgagggactaattcctagtttcatcatccatgagattgtagaagcttttggattgtctgacataagatgtctatgaatatgatttttgccaaatttatccactatcctggcttcgaatccgatggacattatttttttaaacactctttctgaaggatctgtacacgccaacaacggaccacatccttcttcatcaaccgagttgttaatcttggctccatactgtaccaataaatttattctctctatgacttcatcatctgttcccgagagataatatagaggcgttttatgctgtttatcacacgcgtttggatctgcgccgtgcgtcagcagcatcgcgactattctattattattaattttagaagctatatgcaatggataatttccatcatcatccgtctcatttggagagtatcctctatgaagaagttcttcgacaaatcgttcatctagtcctttaattccacaatacgcatgtagaatgtgataattatttccagaaggttcgatagcttgtagcatattcctaaatacatctaaatttttactattatatttggcataaagagatagataatactcggccaacataatgttgtccattgtagtataaaaattaatatttctatttctatttctgtatatttgcaacaatttactctctataacaaatatcataacttagttcttttatgtcaagaaggcactggtttagttcatctataaatgtcacgccataactactacgcatgccatactcagaattatgataaagatatttatccttggggtgtaggtaatggggattaatctttgttggatcagtctctaagttaacacatgtcacacatgatccatttatagttatatcacacgatgatgatttatgaattgattccggaagatcgctatcgtattttgtggttccacaattcatttccatacatgttattgtcacactaatattatgatgaactttatctagccgctgagtggtaaacaacagaacagatagtttattatctttaccaacaccctcagccgctgccacaaatctctgatccgtatccatgatggtcatgtttatttctagtccgtatccagtcaacactatgttagcatttctgtcgatatagctttcactcatatgacactcaccaataatagtagaattaatgtcgtaatttacaccaatagtgagttcggcggcaaagtaccaataccggtaatcttgtcgaggaggacatatagtattcttgtattctaccgaatacccgagagatgcgatacaaaagagtaagactaatttgtaaaccatcttactcaaaatatgtaacaatagtacgatgcaatgagtaagacaataggaaatctatcttatatacacataattattctatcaattttaccaattagttagtgtaatgttaacaaaaatgtgggagaatctaattagtttttctttacacaattgacgtacatgagtctgagttccttgtttttgctaattatttcatccaatttattattcttgacgatatcgagatcttttgtataggagtcagacttgtattcaacatgcttttctataatcattttagctatttcggcatcatccaatagtacattttccagattagcagaatagatattaatgtcgtatttgaacagagcctgtaacatctcaatgtctttattatctatagccaatttaatgtccggaatgaagagaagggaattattggtgtttgtcgacgtcatatagtcgagcaagagaatcatcatatccacgtgtccattttttatagtgatgtgaatacaactaaggagaatagccagatcaaaagtagatggtatctctgaaagaaagtaggaaacaatacttacatcattaagcatgacggcatgataaaatgaagttttccatccagttttcccatagaacatcagtctccaatttttcttaacaaacagttttaccgtttgcatgttaccactatcaaccgcataatacaatgcagtgtttcccttgtcatcaaattgtgaatcatccagtccactgaatagcaaaatctttactattttggtatcttccaatgtggctgcctgatgtaatggaaattcattctctagaagatttttcaatgctccagcgttcaacaacgtacatactagacgcacgttattatcagctattgcataatacaaggcactatgtccatggacatccgccttaaatgtatctttactagagagaaagcttttcagctgcttagacttccaagtattaattcgtgacagatccatgtctgaaacgagacgctaattagtgtatattttttcattttttatcatattgcaccagaattaataatatctctaatagatctgattagtagatacatggctatcgcaaaacaacatatacacatttaataaaaataatatttattaagaaaattcagatttcacgtacccatcaatataaataaaataatgattccttacaccgtacccatattaaggagattccaccttacccataaacaatataaatccagtaatatcatgtctgatgatgaacacaaatggtgtattaaattccagtttttcaggagatgatctcgccgtagctaccataatagtagatgcctctgctacagttccttgttcgtcgacatctatctttgcattctgaaacattttataaatatataatgggtccctagtcatatgtttaaacgacgcattatctggattaaacatactaggagccatcatttcggctatcgacttaatatccctcttattttcgatagaaaatttagggagtttaagattgtacactttattccctaattgagacgaccaatagtctaattttgcagccgtgatagaatctgtgaaatgggtcatattatcacctattgccaggtacatactaatattagcatccttatacggaaggcgtaccatgtcatattctttgtcatcgattgtgattgtatttccttgcaatttagtaactacgttcatcatgggaaccgttttcgtaccgtacttattagtaaaactagcattgcgtgttttagtgatatcaaacggatattgccatatacctttaaaatatatagtattaatgattgcccatagagtattattgtcgagcatattagaatctactacattagacataccggatctacgttctactatagaattaattttattaaccgcatctcgtctaaagtttaatctatataggccgaatctatgatattgttgataatacgacggtttaatgcacacagtattatctacgaaactttgataagttagatcagtgtacgtatatttagatgttttcagcttagctaatcctgatattaattctgtaaatgctggacccagatctctttttctcaaatccatagtcttcaataattctattctagtattacctgatgcaggcaatagcgacataaacatagaaaacgaataaccaaacggtgagaagacaatattatcatcttgaatatttttatacgctactataccggcattggtaaatccttgtagacgataggcggacgctgaacacgctaacgatagtatcaataacgcaatcatgattttatggtattaataattaaccttatttttatgttcggtataaaaaaattattgatgtctacacatccttttgtaattgacatctatatatccttttgtataatcaactctaatcactttaacttttacagttttccctaccagtttatccctatattcaacatatctatccatatgcatcttaacactctctgccaagatagcttcagagtgaggatagtcaaaaagataaatatatagagcataatcattctcgtatactctgccctttattacatcacccgcattgggcaacgaataacaaaatgcaagcatcttgttaacgggctcgtaaattgggataaaaattatgtttttattgtcttatatctattttattcaagagaatattcaggaatttctttttccggttgtatctcgtcgcagtatatatcatttgtacattgtttcatattttttaatagtttacaccttttagtaggactagtatcgtacaattcatagctgtattttgaattccaatcacgcataaaaatatcttccaattgttgacgaagacctaatccatcatccggtgtaatattaatagatgctccacatgtatccgtaaagtaatttcctgtccaatttgaggtacctatataggccgttttatcggttaccatatatttggcatggtttaccctagaatacggaatgggaggatcagcatctggtacaataaatagctttacttctatatttatgtttttagattttagcatagcgatagatcttaaaaagtttctcatgataaacgaagatcgttgccagcaactaatcaatagcttaacggatacttgtctgtctatagcggatcttcttaattcatcttctatataaggccaaaacaaaattttacccgccttcgaataaataatagggataaagttcataacagatacataaacgaatttactcgcatttctaatacatgacaataaagcggttaaatcattggttctttccatagtacatagttgttgcggtgcagaagcaataaatacagagtgtggaacgccgcttacgttaatactaagaggatgatctgtattataatacgacggataaaagtttttccaattatatggtagattgttaactccaagataccagtatacctcaaaaatttgagtgagatccgctgccaagttcctattattgaagatcgcaatacccaattccttgacctgagttagtgatctccaatccatgttagcgcttcctaaataaatatgtgtattatcagatatccaaaattttgtatgaagaactcctcctaggatatttgtaatatctatgtatcgtacttcaactccggccatttgtagtctttcaacatcctttaatggtttgttagatttattaacggctactctaactcgtactcctcttttgggtaattgtacaatctcgtttaatattatcgtgccgaaattcgtacccacttcatccgataaactccaataaaaagatgatatatctagtgtttttgtggtattggatagaatttccctccacatgttaaatgtagacaaatatactttatcaaattgcatacctataggaatagtttctgtaatcactgcgattgtattatccggattcattttatttgttaaaagaataatcctatatcacttcactctattaaaaatccaagtttctatttctttcatgactgattttttaacttcatccgtttccttatgaagatgatgtttggcaccttcataaatttttatttctctattacaatttgcatgttgcatgaaataatatgcacctaaaacatcgctaatcttattgtttgttccctggagtatgagagtcgggggggtgttaatcttggaaattatttttctaaccttgttggtagccttcaagacctgactagcaaatccagccttaattttttcatgattgactaatgggtcgtattggtatttataaactttatccatatctctagatactgattctggacatagctttccgactggcgcatttggtgtgatggttcccataagtttggcagctagcagattcagtcttgaaacagcatctgcattaactagaggagacattagaatcattgctgtaaacaagtttggattatcgtaagaggctagctcccatggaatgacccaataagtagatttaatagttaccacgtgctgtaccaaagtcatcaatcatcattttttcaccattacttcttccatgtccaatatgatcatgtgagaatactaaaattcctaacgatgatatgttttcagctagttcgtcataacgtccagaatgtttaccagctccatgacttatgaatactaatgccttaggatatgtaataggtttccaatatttacaatatatgtaatcattgtccagattgaacatacagtttgcactcatgattcacgttatataactatcaatattaacagttcgtttgatgatcatattatttttatgttttattgataattgtaaaaacatacaattaaatcaatatagaggaaggagacggctactgtcttttgtaagatagtcatggcgactaaattagattatgaggatgctgttttttactttgtggatgatgataaaatatgtagtcgcgactccatcatcgatctaatagatgaatatattacgtggagaaatcatgttatagtgtttaacaaagatattaccagttgtggaagactgtacaaggaattgatgaagttcgatgatgtcgctatacggtactatggtattgataaaattaatgagattgtcgaagctatgagcgaaggagaccactacatcaattttacaaaagtccatgatcaggaaagtttattcgctaccataggaatatgtgctaaaatcactgaacattggggatacaaaaagatttcagaatctagattccaatcattgggaaacattacagatttgatgaccgacgataatataaacatcttgatactttttctagaaaaaaaattgaattgatgatataggggtcttcataacgcataattattacgttagcattctatatccgtgttaaaaaaaattatcctatcatgtatttgagagttttatatgtagcaaacatgatagctgtgatgccaataagctttagatattcacgcgtgctagtgttagggatggtattatctggtggtgaaatgtccgttatataatctacaaaacaatcatcgcatatagtatgcgatagtagagtaaacatttttatagtttttactggattcatacatcgtctacccaattcggttataaatgaaattgtcgccaatcttacacccaaccccttgttatccattagcatagtattaacttcgttatttatgtcataaactgtaaatgattttgtagatgccatatcatacatgatattcatgtccctattataatcattactaactttatcacaatatatgttgataatatctatatatgatctagtctttgtgggcaactgtctatacaagtcgtctaaacgttgtttactcatatagtatcgaacagccatcattacatggtcccgttccgttgatagataatcgagtatgttagtggacttgtcaaatctatataccatattttctggaagtggatatacatagtcgtgatcaacattattgctagcctcatcttctatatcctgtactataccattatctatatcatctacataatctatgatattattacacataaacatcgacaacatactattgtttattatctaagtcctgttgatccaaacccttgatctcctctatttgtactatctagagattgtacttcttccagttctggataatatatacgttgatagattagctgagctattctatctccagtatttacattaaacgtacattttccattattaataagaatgactcctatgtttcccctataatcttcgtctattacaccacctcctatatcaatgccttttagtgacagaccagacctaggagctattctaccatagcagaacttaggcatggacatactaatatctgtcttaattaactgtctttctcctggagggatagtataatcgtaagcgctatacaaatcatatccggcagcacccggcgattgcctagtaggagatttagctctgttagtttccttaacaaatctaactggtgagttaatattcatgttgaacataaaactaatattttatttcaaaattatttaccatcccatatattccatgaataagtgtgatgattgtacacttctatagtatctatatacgatccacgataaaatcctcctatcaatagcagtttattatccactatgatcaattctggattatccctcggataaataggatcatctatcagagtccatgtattgctggattcacaataaaattccgcatttctaccaaccaagaataaccttctaccgaacactaacgcgcatgatttataatgaggataataagtggatggtccaaactgccactgatcatgattgggtagcaaatattctgtagttgtatcagtttcagaatgtcctcccattacgtatataacattgtttatggatgccactgctggattacatctaggtttcagaagactcggcatattaacccaagcagcatccccgtggaaccaacgctcaacagatgtgggatttggtagacctcctactacgtataatttattgttagcgggtatcccgctagcatacagtctggggctattcatcggaggaattggaatccaattgtttgatatataatttaccgctatagcattgttatgtatttcattgttcatccatccaccgatgagatatactacttctccaacatgagtacttgtacacatatggaatatatctataatttgatccatgttcataggatactctatgaatggatacttgtatgatttgcgtggttgtttatcacaatgaaatattttggtacagtctagtatccattttacattatttatacctctgggagaaagataatttgacctgattacatttttgataaggagtagcagatttcctaatttatttcttcgctttatataccacttaatgacaaaatcaactacataatcctcatctggaacatttagttcatcgctttctagaataagtttcatagatagataatcaaaattgtctatgatgtcatcttccagttccaaaaagtgtttggcaataaagtttttagtatgacataagagattggatagtccgtattctatacccatcatgtaacactcgacacaatattcctttctaaaatctcgtaagataaagtttatacaagtgtagatgataaattctacagaggttaatatagaagcacgtaataaattgacgacgttatgactatctatatatacctttccagtatacgagtaaataactatagaagttaaactgtgaatgtcaaggtctagacaaaccctcgtaactggatctttatttttcgtgtatttttgacgtaaatgtgtgcgaaagtaaggagataactttttcaatatcgtagaattgactattatattgcctcctatggcatcaataattgttttgaatttcttagtcatagacaatgctaatatattcttacagtacacagtattgacaaatatcggcatttatgtttctttaaaagtcaacatctagagaaaaatgattatctttttgagacataactcccattttttggtattcacccacacgtttttcgaaaaaattagtttttccttccaatgatatattttccatgaaatcaaacggattggtaacattataaatttttttaaatcccaattcagaaatcaatctatccgcgacgaattctatatatgttttcatcatttcacaattcattcctataagtttaactggaagagccgcagtaagaaattcttgttcaatggatactgcatctgttataatagatctaacggtttcttcactcggtggatgcaataaatgtttaaacatcaaacatgcgaaatcgcagtgcagaccctcgtctctactaattagttcgttggaaaacgtgagtccgggcattaggccacgctttttaagccaaaatatggaagcgaatgatccggaaaagaagattccttctactgcagcaaaggcaataagtctctctccataaccggcgctgtcatgtatccacttttgagcccaatcggccttcttttttacacaaggcatcgtttctatggcattaaagagatagtttttttcattactatctttaacataagtatcgatcaaaagactatacatttccgaatgaatgttttcaatggccatctgaaatccgtagaaacatctagcctcggtaatctgtacttctgtacaaaatcgttccgccaaattttcattcactattccgtcactggctgcaaaaaacgccaatacatgttttataaaatatttttcgtctggtgttagtttattccaatcattgatatctttagatatatctacttcttccactgtccaaaatgatgcttctgcctttttatacatgttccagatgtcatgatattggattgggaaaataacaaatctatttggatttggtgcaaggatgggttccataactaaattaacaataacaataaattttttttcagttatctatatgcctgtacttggatcttttgtacatcgatatcgccgcaatcactacaataattacaagtattattgatagcattgttattagtactatcataattaaattatctacattcatgggtgctgaataatcgttattatcatcattatcattttgtaattgtgacatcatactagataaatcgtttgcgagattgttgtgggaagcgggcatggaggatgcattatcattattatttaacgccttccattcggattcacaaatgttacgcacattcaacattttatggaaactataattttgtgaaaacaaataacaagaaaactcgtcatcgttcaaatttttaacgatagtaaaccgattaaacgtcgagctaatttctaacgctagcgactctgttggatatgggtttccagatatatatcttttcagttcccctacgtatctataatcatctgtaggaaatggaagatatttccatttatctactgttcctaatatcatatgtggtggtgtagtagaaccattaagcgcgaaagatgttatttcgcatcgtattttaacttcgcaataatttctggttagataacgcactctaccagtcaagtcaatgatattagcctttacagatatattcatagtagtcgtaacgatgactccatcttttagatgcgatactcctttgtatgtaccagaatcttcgtacctcaaactcgatatatttaaacaagttaatgagatattaacgcgttttatgaatgatgatatataaccagaagttttatcctcggtggctagcgctataaccttatcattataataccaactagtgtgattaatatgtgacacgtcagtgtgggtacaaatatgtacattatcgtctacgtcgtattcgatacatccgcatacagccaacaaatataaaatgacaaatactctaacgccgttcgtacccatcttgatgcggtttaataaatgttttgatttcaatttattgtaaaaaaagattcggttttatactgttcgatattctcattgcttatattttcatctatcatctccacacagtcaaatccgtggttagcatgcacctcatcaaccggtaaaagactatcggactcttctatcattataactctagaatatttaatttggtcattattaatcaagtcaattatcttatttttaacaaacgtgagtattttactcattttttataaaaacttttagaaatatacagactctatcgtgtgtctatatcttctttttatatccaatgtatttatgtctgatttttcttcatttatcatatataatggtccaaattctacacgtgcttcggattcatccagatcattaaggttcttataattgtaacatccttctcttccctcttctacatcttccttcttattcttattcttagcgtcacagaatctaccacagcaggatcccatgacgagcgtcatattaaactaatccattttcaattataatatatgattagtaatgaccattaaaataaaaaatattcttcataaccggcaagaaagtgaaaagttcacattgaaactatgtcagtagtatacatcatgaaatgatgatatatatatatactctattttggtggaggattatatgatataattcgtggataatcattcttaagacacatttcttcattcgtaaatcttttcacgttaaatgagtgtccatattttgcaatttcttcatatgatggcggtgtacgtggacgaggctgctcctgttcttgttgtagtcgccgactgtcgtgtctgcgtttagatccctccattatcgcgattgcgtagatggagtactattttataccttgtaattaaatttttttattaattaaacgtataaaaacgttccgtatctgtatttaagagccagatttcgtctaatagaacaaatagctacagtaaaaataactagaataattgctacacccactagaaaccacggatcgtaatacggcaatcggttttcgataataggtggaacgtatattttatttaaggacttaacaattgtctgtaaaccacaatttgcttccgcggatcctgtattaactatctgtaaaagcatatgttgaccgggcggagccgaacattctccgatatctaatttctgtatatctataatattattaacctccgcatacgcattacagttcttttctagcttggataccgcactaggtacatcgtctagatctattcctatttcctcagcgatagctcttctatccttttccggaagcaatgaaatcacttcaataaatgattcaaccatgagtgtgaaactaagtcgagaattactcatgcatttgttagttattcggagcgcgcaatttttaaactgtcctataacctctcctatatgaatagcacaagtgacattagtagggatagaatgttgagctaatttttgtaaataactatctataaaaagattatacaaagttttaaactctttagtttccgccatttatccagtctgagaaaatgtctctcataataaatttttccaagaaactaattgggtgaagaatggaaacctttaatctatatttatcacagtctgttttggtacacatgatgaattcttccaatgccgtactaaattcgatatctttttcgatttctggatatgtttttaataaagtatgaacaaagaaatggaaatcgtaataccagttatgtttaactttgaaattgttttttattttcttgttaatgattccagccacttgggaaaagtcaaagtcgtttaatgccgatttaatacgttcattaaaaacaaactttttatcctttagatgaattattattggttcattggaatcaaaaagtaagatattatcgggtttaagatctgcgtgtaaaaagttgtcgcaacagggtagttcgtagattttaatgtataacagagccatctgtaaaaagataaactttatgtattgtaccaaagatttaaatcctaatttgatagctaactcggtatctactttatctgccgaatacagtgctaggggaaaaattataatgtttcctctttcgtattcgtagttagttctcttttcatgttcgaaaaagtgaaacatgcggttaaaatagtttataacattaatattactgttaataactgccggataaaagtgggatagtaatttcacgaatttgatactgtcctttctctcgttaaacgcctttaaaaaaactttagaagaatatctcaatgagagttcctgaccatccatagtttgtatcaataatagcaacatatgaagaacccgtttatacagagtatgtaaaaatgttaatttatagtttaatcccatggcccacgcacacacgattaattttttttcatctccctttagattgttgtatagaaatttgggtactgtgaactccgccgtagtttccatgggactatataattttgtggcctcgaatacaaattttactacatagttatctatcttaaagactataccatatcctcctgtagatatgtgataaaaatcgtcgtttataggataaaatcgtttatccttttgttggaaaaaggatgaattaatgtaatcattctcttctatctttagtagtgtttccttattaaaattcttaaaataatttaacaatctaactgacggagcccaattttggtgtaaatctaattgggacattatattgttaaaatacaaacagtctcctaatataacagtatctgataatctatggggagacatccattgatattcaggggatgaatcattggcaacacccatttattgtacaaaaagccccaatttacaaacgaaagtccaggtttgatagagacaaactattaactattttgtctctgtttttaacacctccacagtttttaatttctttagtaatgaaattattcacaatatcagtatcttctttatctaccagagattttactaacttgataaccttggctgtctcattcaatagggtagtaatatttgtatgtgtgatattgatatctttttgaattgtttcttttagaagtgattctttgatggtgccagcatacgaattacaataatgcagaaactcggttaacatgcaggaattatagtaagccaattccaattgttgcctgtgttgtattagagtgtcaatatgagcaatggtgtccttgcgtttctctgatagaatgcgagcagcgattttggcgttatcatttgacgatatttctggaatgacgaatcctgtttctactaactttttggtaggacaaagtgaaacaatcaagaagatagcttctcctcctatttgtggaagaaattgaactcctctagatgatctactgacgatagtatctccttgacagatattggaccgaattacagaagtacctggaatgtaaagccctgaaaccccctcattttttaagcagattgttgccgtaaatcctgcactatgcccaagatagagagctcctttggtgaatccatctctatgtttcagtttaaccaagaaacagtcagctggtctaaaatttccatctctatctaatacagcatctaacttgatgtcaggaactatgaccggtttaatgttatatgtaacattgagtaaatccttaagttcataatcatcactgtcatcagttatgtacgatccaaacaatgtttctaccggcatagtggatacgaagatgctatccatcagaatgtttccctgattagtattttctatatagctattcttctttaaacgattttccaaatcagtaactatgttcatttttttaggagtaggacgcctagccagtatggaagaggattttctagatcctctcttcaacatctttgatctcgatggaatgcaaaaccccatagtgaaacaaccaacgataaaaataatattgtttttcactttttataattttaccatctgactcatggattcattaatatctttataagagctactaacgtataattctttataactgaactgagatatatacaccggatctatggtttccataattgagtaaatgaatgctcggcaataactaatggcaaatgtatagaacaacgaaattatactagagttgttaaagttaatattttctatgagctgttccaataaattatttgttgtgactgcgttcaagtcataaatcatcttgatactatccagtaaaccgtttttaagttctggaatattattatcccattgtaaagcccctaattcgactatcgaatatcctgctctgatagcagtttcaatatcgacggacgtcaatactgtaataaaggtggtagtattgtcatcatcgtgataaactactggaatatggtcgttagtaggtacggtaactttacacaacgcgatatataactttccttttgtaccatttttaacgtagttgggacgtcctgcagggtattgttttgaagaaatgatatcgagaacagatttgatacgatatttgttggattcctgattattcactataatataatctagacagatagatgattcgataaatagagaaggtatatcgttggtaggataatacatccccattccagtattctcggatactctattgatgacactagttaagaacatgtcttctattctagaaaacgaaaacatcctacatggactcattaaaacttctaacgctcctgattgtgtctcgaatgcctcgtacaaggatttcaaggatgccatagattctttgaccaacgatttagaattgcgtttagcatctgatttttttattaaatcgaatggtcggctctctggtttgctaccccaatgataacaatagtcttgtaaagataaaccgcaagaaaatttatacgcatccatccaaataaccctagcaccatcggatgatattaatgtattattatagattttccatccacaattattgggccagtatactgttagcaacggtatatcgaatagattactcatgtaacctactagaatgatagttcgtgtactagtcataatatctttaatccaatctaaaaaatttaaaattagattttttacactgttaaagttaacaaaagtattacccgggtacgtggatatcatatatggcattggtccattatcagtaatagctccataaactgatacggcgatggtttttatatgtgtttgatctaacgaggaagaaattcgcgcccacaattcatctctagatatgtatttaatatcaaacggtaacacatcaatttcgggacgcgtatatgtttctaaatttttaatccaaatataatgatgacctatatgccctattatcatactgtcaactatagtacacctagggaacttacgatacatctgtttcctataatcgttaaattttacaaatctataacatgctaaaccttttgacgacagccattcattaatttctgatatggaatctgtattctcgataccgtatcgttctaaagccagtgctatatctccctgttcgtgggaacgctttcgtataatatcgatcaacggataatctgaagtttttggagaataatatgactcatgatctatttcgtccataaacaatctagacataggaattggaggcgatgatcttaattttgtgcaatgagtcgtcaatcctataacttctaatcttgtaatattcatcatcgacataatactatctatgttatcatcgtatattagtataccatgaccttcttcatttcgtgccaaaatgatatacagtcttaaatagttacgcaatatctcaatagtttcataattgttagctgttttcatcaaggtttgtatcctgtttaacatgatggcgttctataacgtctctattttctatttttaattttttaaatttttaacgatttactgtggctagatacccaatctctctcaaatatttttttagcctcgcttacaagctgtttatctatactattaaaactgacgaatccgtgattttggtaatgggttccgtcgaaatttgccgaagtgatatgaacatattcgtcgtcgactatcaacaattttgtattattctgaatagtgaaaaccttcacagatagatcattttgaacacacaacgcatctagacttttggcggttgccatagaatatacgtcgttcttatcccaattaccaactagaagtctgatcttaactcctctattaatggctgcttctataatggagttgtaaatgtcgggccaatagtagctattaccgtcgacacgtgtagtgggaactatggccaaatgttcaatatctatactagtcttagctgacctgagtttatcaataactacatcggtatctagatctctagaatatcccaataggtgttccggagaatcagtaaagaacactccacctataggattcttaatatgatacgcagtgctaactggcaaacaacaagccgcagagcataaattcaaccatgaattttttgcgctattaaaggctttaaaagtatcaaatcttctacgaagatctgtggccagcgggggataatcagaatatacacctaacgttttaatcgtatgtatagatcctccagtaaatgacgcgtttcctacataacatctttcatcatctgacacccaaaaacaaccgagtagtagtcccacattattttttttatctatattaacggttataaaatttatatccgggcagtgactttgtagctctcccagatttcttttccctcgttcatctagcaaaactattattttaatccctttttcagatgcctcttttagtttatcaaaaataagcgctcccctagtcgtactcagaggattacaacaaaaagatgctatgtatatatatttcttagctagagtgataatttcgttaaaacattcaaatgttgttaaatgatcggatctaaaatccatattttctggtagtgtttctaccagcctacattttgctcccgcaggtaccgatgcaaatggccacatttagttaacataaaaacttatacatcctgttctatcaacgattctagaatatcatcggctatatcgctaaaattttcatcaaagtcgacatcacaacctaactcagtcaatatattaagaagttccatgatgtcatcttcgtctatttctatatccgtatccattgtagattgttgaccgattatcgagtttaaatcattactaatactcaatccttcagaatacaatctgtgtttcattgtaaatttataggcggtgtatttaagttggtagattttcaattatgtattaatatagcaacagtagttcttgctcctccttgattctagcatcctcttcattattttcttctacgtacataaacatgtccaatacgttagacaacacaccgacgatggcggccgctacagacacgaatatgactaaaccgatgaccatttaaaaacccctctctagctttcacttaaactgtatcgatcattcttttagcacatgtataatataaaaacattattctatttcgaatttaggcttccaaaaatttttcatccgtaaaccgataataatatatatagacttgttaatagtcggaataaatagattaatgcttaaactatcatcatctccacgattagagatacaatatttacattctttttgctgtttcgaaactttatcaatacacgttaatacaaacccaggaaggagatattgaaactgaggctgttgaaaatgaaacggtgaatacaataattcagataatgtaaaatcatgattccgtattctgatgatattagaactgctaatggatgtcgatggtatgtatctaggagtatctattttaacaaagcatcgatttgctaatatacaattatccttttgattaattgttattttattcatattcttaaaaggtttcatatttatcaattcttctacattaaaaatttccatttttaatttatgtagccccgcaatactcctcattacgtttcattttttgtctataatatccattttgttcatctcggtacatagattatccaattgagaagcgcatttagtagttttgtacattttaagtttattgacgaatcgtcgaaaactagttatagttaacattttattatttgataccctgatattaatacccctgccgttactattatttataactgatgtaatccacgtaacattggaattaactatcgatagtaatgcatcgacgcttccaaaattgtctattataaactcaccgataatttttttattgcatgttttcatattcattaggattatcaaatctttaatcttattacgattgtatgcgttgatattacaagacgtcattctaaaagacggaggatctccatcaaatgccagacaatcacgtacaaagtacatggaaataggttttgttctattgcgcatcatagatttatatagaacacccgtagaaatactaatttgttttactctataaaatactaatgcatctatttcatcgttttgtataacgtctttccaagtgtcaaattccaaatttttttcattgatagtaccaaattcttctatctctttaactacttgcatagataggtaattacagtgatgcctacatgccgttttttgaaactgaatagatgcgtctagaagcgatgctacgctagtcacaatcaccactttcatatttagaatatatatatgtaaaaatatagtagaatttcattttgtttttttctatgctataaatgaattctcattttgcatctgctcatactccgttttatattaataccaaagaaggaagatatctggttctaaaagccgttaaagtatgcgatgttagaactgtagaatgcgaaggaagtaaagcttcctgcgtactcaaagtagataaaccctcatcgcccgcgtgtgagagaagaccttcgtccccgtccagatgcgagagaatgaataaccctggaaaacaagttccgtttatgaggacggacatgctacaaaatatgttcgcggctaatcgcgataatgtagcttctagacttttgtcctaaaatactattatatccttttcgatattaataaatccgtgtcgtccaggttttttatctctttcagtatgtgaatagataggtattttatctctattcatcatcgaatttaagagatccgataaacattgtttgtattctccagatgtcagcatctgatacaacaatatatgtgcacataaacctctggcacttatttcatgtaccttccccttatcactaaggagaatagtatttgagaaatatgtatacatgatattatcatgaattagatatacagaatttgtaacactctcgaaatcacacgatgtgtcggcgttaagatctaatatatcactcgataacacattttcatctagatacactagacattttttaaagctaaaatagtctttagtagtaacagtaactatgcgattattttcatcgatgatacatttcatcggcatattattacgcttaccatcaaagactataccatgtgtatatctaacgtattctagcatagttgccatacgcgcattaaacttttcaggatctttggatagatcttccaatctatctatttgagaaaacatttttatcatgttcaatagttgaaacgtcggatccactatatagatattatctataaagattttaggaactacgttcatggtatcctggcgaatattaaaactatcaatgatatgattatcgttttcatcttttatcaccatatagtttctaagatatgggattttacttaatataatattatttcccgtgataaattttattagaaaggccaaatctataagaaaagtcctagaattagtctgaagaatatctatatcgccgtatagtatatttggattaattagatatagagaatatgatccgtaacatatacaacttttattatggcgtctaagatattcttccatcaacttattaacatttttgactagggaagatacattatgacgtcccattacttttgccttgtctattactgcgacgttcatagaatttagcatatctcttgccaattcttccattgatgttacattataagaaattttagatgaaattacatttggagctttaatagtaagaactcctaatatgtccgtgtatgtggtcactaatacagattgtagttctataatcgtaaataatttacctatattatatgtttgagtctgtttagaaaagtagctaagtatacgatcttttatttctgatgcagatgtatcaacatcggaaaaaaatctttttttattcttttttactaaagatacaaatatgtctttgttaaaaacagttattttctgaatatttctagcttgtaattttaacatatgatattcgttcacactaggtactctgcctaaataggtttctataatctttaatgtaatattaggaaaagtattctgatcaggattcctattcattttgaggatttaaaactctgattattgtctaatatggtctctacgcaaactttttcacagagcgatagagtttttgataactcgtttttcttaagaaatataaaactactgtctccagagctcgctctatcttttattttatctaattcgatacaaactcctgatactggttcagaaagtaattcattaattttcagtcctttatagaagatatttaatatagataatacaaaatcttcagtttttgatatcgatctgattgatcctagaactagatatattaataacgtgctcattaggcagtttatggcagcttgataattagatatagtatattccagttcatatttattagataccgcattgcccagattttgatattctatgaattcctctgaaaataaatccaaaataactagacattctattttttgtggattagtgtactctcttccctctatcatgttcactactggtgtccacgatgataaatatctagagggaatataatatagtccataggatgccaatctagcaatgtcgaataactgtaattttattcttcgctcttcattatgaattgattcttgaggtataaacctaacacaaattatattattagacttttcgtatgtaatgtctttcatgttataagtttttaatcctggaatagaatctattttaatgaggcttttaaacgcagagttctccaacgagtcaaagcataatactctgttgtttttcttatatacgatgttacgattttcttctttgaatggaataggtttttgaattagtttataattacaacataatagataaggaagtgtgcaaatagtacgcggaaaaaacataatagctcccctgttttcatccatggttttaagtaaatgatcactggcttctttagtcaatggatattcgaacattaaccgtttcatcatcattggacagaatccatatttcttaatgtaaagagtgatcaaatcattgtgtttattgtaccatcttgttgtaaatgtgtattcggttatcggatctgctcctttttctattaaagtatcgatgtcaatctcgtctaagaattcaactatatcgacatatttcatttgtatacacataaccattactaacgtagaatgtataggaagagatgtaacgggaacagggtttgttgattcgcaaactattctaatacataattcttctgttaatacgtcttgcacgtaatctattatagatgccaagatatctatataattattttgtaagatgatgttaactatgtgatctatataagtagtgtaataattcatgtattttgatatatgttccaactctgtctttgtgatgtctagtttcgtaatatctatagcatcctcaaaaaatatattcgcatatattcccaagtcttcagttctatcttctaaaaaatcttcaacgtatggaatataataatctattttacctcttctgatatcattaatgatatagtttttgacactatcttctgtcaattgattcttattcactatatctaagaaacggatagcgtccctaggacgaactactgccattaatatctctattatagcttctggacataattcatctattataccagaattaatgggaactattccgtatctatctaacatagttttaagaaagtcagaatctaagacctgatgttcatatattggttcatacatgaaatgatctctattgatgatagtgactatttcattctctgaaaattggtaactcattctatatatgctttccttgttgatgaaggatagaatatactcaatagaatttgtaccaacaaactgttctcttatgaatcgtatatcatcatctgaaataatcatgtaaggcatacatttaacaattagagacttgtctcctgttatcaatatactattcttgtgataatttatgtgtgaggcaaatttgtccacgttctttaattttgttatagtagatatcaaatccaatggagctacagttcttggcttaaacagatatagtttttctggaacaaattctacaacattattataaaggactttgggtagataagtgggatgaaatcctattttaattaatgcgatagccttgtcctcgtgcagatatccaaacgcttttgtgatagtatggcattcattgtctagaaacgctctacgaatatctgtgacagatatcatctttagagaatatactagtcgcgttaatagtactacaatttgtattttttaatctatctcaataaaaaaattaatatgtatgattcaatgtataactaaactactaactgttattgataactagaatcagaatctaatgatgacgtacccaagaagtttatctactgccaatttagctgcattatttttagcatctcgtttagattttccatctgccttatcgaatactcttccgtcgatatctacacaggcataaaatgtaggagagttactaggcccaactgattcaatacgaaaagaccaatctctcttagttatttggcagtactcattaataacggtgacagggttagcatctttccaatcaataatttttttagccggaataacatcatcaaaagacttatgatcctctctcattgatttttcgcgggatacatcatctattatgacgtcagccataacatcagcatccggcttatccgcctccgttgtcataaaccaacgaggaggaatatcgtcggagctgtacaccatagcactacgttgaagatcgtacagagctttattaacttctcgcttctccatattaagttgtctagttagttgtgcagcagtagctccttcgattccaatggttttaatagcctcacacacaatctctgcgttagaacgttcgtcgatatagattttagacatttttagagagaactaacacaaccagcaataaaactgaacctactttatcatttttttattcatcatcctctggtggttcgtcgttcctatcaaatgtagctctgattaacccgtcatctataggtgatgctggttctggagattctggaggagatggattattatctggaagaatctctgttatttccttgttttcatgtatcgattgcgttgtaacattaagattgcgaaatgctctaaatttgggaggcttaaagtgttgtttgcaatctctacacgcgtgtctaactagtggaggttcgtcagctgctctagtttgaatcatcatcggcgtagtattcctacttttacagttaggacacggtgtattgtatttctcgtcgagaacgttaaaataatcgttgtaactcacatcctttattttatctatattgtattctactcctttcttaatgcattttataccgaataagagatagcgaaggaattctttttcggtgccgctagtacccttaatcatatcacatagtgttttatattccaaatttgtggcaatagacggtttatttctatacgatagtttgtttctggaatcctttgagtattctataccaatattattctttgattcgaatttagtttcttcgatattagattttgtattacctatattcttgatgtagtactttgatgatttttccatggcccattctattaagtcttccaagttggcatcatccacatattgtgatagtaattctcggatatcagtagcggctaccgccattgatgtttgttcattggatgagtaactactaatgtatacattttccatttataacacttatgtattaactttgttcatttatattttttcattattatgttgatattaacaaaagtgaatatatatatgttaataattgtattgtggttatacggctacaattttataatgagtgaaagtcagtgtccgatgatcaatgacgatagctttactctgaaaagaaagtatcaaatcgatagtgcggagtcaacaataaaaatggataagaagaggataaagtttcagaatagagccaaaatggtaaaagaaataaatcagacaataagagcagcacaaactcattacgagacattgaaactaggatacataaaatttaagagaatgattaggactactactctagaagatatagcaccatctattccaaataatcagaaaacttataaactattctcggacatttcagccatcggcaaagcatcacagaatccgagtaagatggtatatgctctgctgctttacatgtttcccaatttgtttggagatgatcatagattcattcgttatagaatgcatccaatgagtaaaatcaaacacaagatcttctctcctttcaaacttaatcttattagaatattagtggaagaaagattctataataatgaatgcagatctaataaatggaaaataattggaacacaagttgataaaatgttgatagctgaatctgataaatatacaatagatgcaaggtataacctaaaacccatgtatagaatcaagggagaatctgaagaagataccctcttcatcaaacagatggtagaacaatgtgtgacatcccaggaattggtggaaaaagtgttgaagatactgtttagagatttgttcaagagtggagaatacaaagcgtacagatacgatgatgatgtagaaaatggattcattggattggatacactaaaattaaacattgttcatgatatagttgaaccatgtatgcctgttcgtaggccagtggctaagatactgtgtaaagaaatggtaaataaatactttgagaatccgctacatattattggtaaaaatcttcaagagtgcattgactttgttagtgaataggcatttcatctttctccaatactaattcaaattgttaaattaataatggatagtataaatagttattagttataagatagtaaaaataattattagaataagagtgtagtatcatagataactctcttctataaaaatggattttattcgtagaaagtatcttatatacacagtagaaaataatatagattttttaaaggatgatacattaagtaaagtaaacaattttaccctcaatcatgtactagctctcaagtatctagttagcaattttcctcaacacgttattactaaggatgtattagctaataccaatttttttgttttcatacatatggtacgatgttgtaaagtgtacgaagcggttttacgacacgcatttgatgcacccacgttgtacgttaaagcattgactaagaattatttatcgtttagtaacacaatacaatcgtacaaggaaaccgtgcataaactaacacaagatgaaaaatttttagaggttgccgaatacatggacgaattaggagaacttataggcgtaaattatgacttagttcttaatccattatttcacggaggggaacccatcaaagatatggaaatcatttttttaaaactgtttaagaaaacagacttcaaagttgttaaaaaattaagtgttataagattacttatttgggcatacctaagcaagaaagatacaggcatagagtttgcggataatgatagacaagatatatatactctatttcaacaaactggtagaatcgtccatagcaatctaacagaaacgtttagagattatatctttcccggagataagactagctattgggtgtggttaaacgaaagtatagctaatgatgcggatattgttcttaatagacacgccattaccatgtatgataaaattcttagttatatatactctgagataaaacaaggacgcgttaataaaaacatgcttaagttagtttatatctttgagcctgaaaaagatatcagagaacttctgctagaaatcatatatgatattcctggagatatcctatctattattgatgcaaaaaacgacgattggaaaaaatattttattagtttttataaagctaattttattaacggtaatacatttattagtgatagaacgtttaacgaggacttattcagagttgttgttcaaatagatcccgaatatttcgataatgaacgaattatgtctttattctctacgagtgctgcggacattaaacgatttgatgagttagatattaataacagttatatatctaatataatttatgaggtgaacgatatcacattagatacaatggatgatatgaagaagtgtcaaatctttaacgaggatacgtcgtattatgttaaggaatacaatacatacctgtttttgcacgagtcggatcccatggtcatagagaacggaatactaaagaaactgtcatctataaaatccaagagtagacggctgaacttgtttagcaaaaacattttaaaatattatttagacggacaattggctcgtctaggtcttgtgttagatgattataaaggagacttgttagttaaaatgataaaccatcttaagtctgtggaggatgtatccgcattcgttcgattttctacagataaaaaccctagtattcttccatcgctaatcaaaactattttagctagttataatatttccatcatcgtcttatttcaaaggtttttgagagataatctatatcatgtagaagaattcttggataaaagcatccatctaaccaagacggataagaaatatatacttcaattgataagacacggtagatcatagaacagaccaaatatattattaataatttgtatatacatagatataattatcacacatttttgataaatgggaactgctgcaacaattcagactcccaccaaattaatgaataaagaaaatgcagaaatgattttggaaaaaattgttgatcatatagttatgtatattagtgacgaatcaagtgattcagaaaataatcctgaatatattgattttcgtaacagatacgaagactatagatctctcattataaaaagtgatcacgagtttgtaaagctatgtaaaaatcatgcggagaaaagttctccagaaacgcaacaaatgattatcaaacacatatacgaacaatatcttattccagtatctgaagtactattaaaacctataatgtccatgggtgacataattacatataacggatgtaaagacaatgaatggatgctagaacaactctctaccctaaactttaacaatctccgcacatggaactcatgtagcataggcaatgtaacgcgtctgttttatacattttttagttatctgatgaaagataaactaaatatataagtataatcccattctaatactttaacctgatgtattagcatcttattagaatattaacctaactaaaagacataacataaaaactcattacatagttgataaaaagcggtaggatataaatattatggctgccaccgttccgcgttttgacgacgtgtacaaaaatgcacaaagaagaattctagatcaagaaacattttttagtagaggtctaagtagaccgttaatgaaaaacacatatctatttgataattacgcgtatggatggataccagaaactgcaatttggagtagtagatacgcaaacttagatgcaagtgactattatcccatttcgttgggattacttaaaaagttcgagtttctcatgtctctatataaaggtcctattccagtatacgaagaaaaagtaaatactgaattcattgctaatggatctttctccggtagatacgtatcatatcttagaaagttttctgctcttccaacaaacgagtttattagttttttgttactgacttccattccaatctataatatcttgttctggtttaaaaatactcagtttgatattactaaacacacattattcagatacgtctatacagataatgccaaacacctggcgttggctaggtatatgtatcaaacaggagactataagcctttgtttagtcgtctcaaagagaattatatatttaccggtcccgttccaatatgtatcaaagatatagatcaccctaatcttagtagagcaagaagtccatccgattatgagacattagctaatattagtactatattgtactttaccaagtatgatccggtattaatgtttttattgttttacgtacctgggtattcaattactacaaaaattactccagccgtagaatatctaatggataaactgaatctaacaaagagcgacgtacaactgttgtaaattattttatgcttcgtaaaatgtaggttttgaaccaaacattctttcaaagaatgagatgcataaaactttattatccaatagattgactatttcggacgtcaatcgtttaaagtaaacttcgtaaaatattctttgatcactgccgagtttaaaacttctatcgataattgtttcatatgttttaatatttacaagttttttggtccatggtccattaggacaaatatatgcaaaataatatcgttctccaagttctatagtctctggattatttttattatattcagtaaccaaatacatattagggttatctgcggatttataatttgagtgatgcattcgactcaacataaataattctagaggagacgatctactatcaaattcggatcgtaaatctgtttctaaagaacggagaatatctatacatacctgattagaattcatccgtccttcagacaacatctcagacagtctggtcttgtatgtcttaatcatattcttatgaaacttggaaacatctcttctagtttcactagtacctttattaattctctcaggtacagattttgaattcgacgatgctgagtatttcatcgttgtatatttcttcttcgattgcataatcagattcttatataccgcctcaaactctattttaaaattattaaacaatactctattattaatcagtcgttctaactctttcgctatttctatagacttatctacatcttgactgtctatctctgtaaacacggagtcggtatctccatacacgctacgaaaacgaaatctgtaatctataggcaacgatgttttcacaatcggattaatatctctatcgtccatataaaatggattacttaatggattggcaaaccgtaacataccgttagataactctgctccatttagtaccgattctagatacaagatcattctacgtcctatggatgtgcaactcttagccgaagcgtatgagtatagagcactatttctaaatcccatcagaccatatactgagttggctactatcttgtacgtatattgcatggaatcatagatggccttttcagttgaactggtagcctgttttagcatctttttatatctggctctctctgccaaaaatgttcttaatagtctaggaatggttccttctatcgatctatcgaaaattgctatttcagagatgaggttcggtagtctaggttcacaatgaaccgtaatatatctaggaggtggatatttctgaagcaatagctgattatttatttcttcttccaatctattggtactaacaacgacaccgactaatgtttccggagatagatttccaaagatacacacattaggatacagactgttataatcaaagattaatacattattactaaacattttttgttttggagcaaataccttaccgccttcataaggaaacttttgttttgtttctgatctaactaagatagttttagtttccaacaatagctttaacagtggacccttgatgactgtactcgctctatattcgaataccatggattgaggaagcacatatgttgacgcacccgcgtctgtttttgtttctactccataatactcccacaaatactgacacaaacaagcatcatgaatacagtatctagccatatctaaagctatgtttagattataatccttatacatctgagctaaatcaacgtcatcctttccgaaagataatttatatgtatcattaggtaaagtaggacataatagtacgactttaaatccattttcccaaatatctttacgaattactttacatataatatcctcatcaacagtcacataattacctgtggttaaaacctttgcaaatgcagcggctttgcctttcgcgtctgtagtatcgtcaccgatgaacgtcatttctctaactcctctatttaatactttacccatgcaactgaacgcgttcttggatatagaatccaatttgtacgaatccaatttttcaaatttttgaatgaatgaatatagatcgaaaaatatagttccattattgttattaacgtgaaacgtagtattggccatgccgcctactcccttatgactagactgatttctctcataaatacagagatgtacagcttcctttttgtccggagatctaaagataatcttctctcctgttaataactctagacgattagtaatatatctcagatcaaagttatgtccgttaaaggtaacgacgtagtcgaacgttagttccaacaattgtttagctattcgtaacaaaactatttcagaacatagaactagttctcgttcgtaatccatttccattagtgactgtatcctcaaacatcctctatcgacggcttcttgtatttcctgttccgttaacatctcttcattaatgagcgtaaacaataatcgtttaccacttaaatcgatataacagtaacttgtatgcgagattgggttaataaatacagaaggaaacttcttatcgaagtgacactctatatctagaaataagtacgatcttgggatatcgaatctaggtatttttttagcgaaacagttacgtggatcgtcacaatgataacatccattgttaatctttgtcaaatattgctcgtccaacgagtaacatccgtctggagatatcccgttagaaatataaaaccaactaatattgagaaattcatccatggtggcattttgtatgctgcgtttctttggctcttctatcaaccacatatctgcgacggagcattttctatctttaatatctagattataacttattgtctcgtcaatgtctatagttctcatctttcccaacggcctcgcattaaatggaggaggagacaatgactgatatatttcgtccgtcactacgtaataaaagtaatgaggaaatcgtataaatacggtctcaccatttcgacatctggatttcagatataaaaatctgttttcaccgtgactttcaaaccaattaatgcaccgaacatccatttatagaatttagaaatatattttcatttaaatgaatcccaaacattggggaagagccgtatggaccattatttttatagtactttcgcaagcgggtttagacggcaacatagaagcgtgtaaacgaaaactatatactatagttagcactcttccatgtcctgcatgtagacggcacgcgactatcgctatagaggacaataatgtcatgtctagcgatgatctgaattatatttattattttttcatcagattatttaacaatttggcatctgatcccaaatacgcgatcgatgtgacaaaggttaaccctttataaacttaacccattataaaacttatgattagtcacaactgaaataaccgcgtgattattttttggtataattctacacggcatggtttctgtgactatgaattcaacccccgttacattagtgaaatctttaacaaacagcaagggttcgtcaaagacataaaactcattgtttacaatcgaaatagaccccctatcacacttaaaataaaaaatatccttatcctttaccaccaaataaaattctgattggtcaatgtgaatgtattcacttaacagttccacaaatttatttattaactccgaggcacatacatcgtcggtattttttatggcaaactttactcttccagcatccgtttctaaaaaaatattaacgagttccatttatatcatccaatattattgaaatgacgttgatggacagatgatacaaataagaaggtacggtacctttgtccaccatctcctccaattcatgctctattttgtcattaactttaatgtatgaaaacagtacgccacatgcttccatgacagtgtgtaacactttggatacaaaatgtttgacattagtataattgttcaagactgtcaatctataatagatagtagctataatatattctatgatggtattgaagaagatgacaaccttggcatattgatcatttaacacagacatggtatcaacagatagcttgaatgaaagagaatcagtaattggaataagcgtcttctcgatagagtgtccgtataccaacatgtctgatattttgatgtattccattaaattatttagttttttctttttattctcgttaaacagcatttctgtcaacggaccccaacatcgttgaccgattaagttttgattgatttttccgtgtaaggcgtatctagtcagatcgtatagcctatccaataatccatcatctgtgcgtagatcacatcgtacactttttaattctctatagaagagcgacagacatctggagcaattacagacagcaatttctttattctctacagatgtaagatacttgaagacattcctatgatgatgcagaattttggataacacggtattgatggtatctgttaccataattcctttgatggctgatagtgtcagagcacaagatttccaatctttgacaatttttagcaccattatctttgttttgatatctatatcagacagcatggtgcgtctgacaacacagggattaagacggaaagatgaaatgattctctcaacatcttcaatagataccttgctattttttctggcattatctatatgtgcgagaatatcctctagagaatcagtatcctttttgatgatagtggatctcaatgacatgggacgtttaaaccttcttattctatcaccagattgcatggtgatttgtcttctttcttttatcataatgtaatctctaaattcatcggcaaattgtctatatctaaaatcataatatgagatgtttacctctacaaatatctgttcgtccaatgttagagtatttacatcagttttgtattccaaattaaacatggcaacggatttaattttatattcctctattaagtcctcgtcgataataacagaatgtagataatcatttaatccatcgtacatggttggaagatgcttgttgacaaaatctttaattgtcttgatgaaggtgggactatatctaacatcttgattaataaaatttataacattgtccataggatactttgtaactagttttatacacatctcttcatcggtaagtttagacagaatatcgtgaacaggtggtatattatattcatcagatatacgaagaacaatgtccaaatctatattgtttaatatattatatagatgtagcgtagctcctacaggaatatctttaactaagtcaatgatttcatcaaccgttagatctattttaaagttaatcatataggcattgatttttaaaaggtatgtagccttgactacattctcattaattaaccattccaagtcactgtgtgtaagaagattatattctatcataagcttgactacatttggtcccgataccattaaagaattcttatgatataaggaaacagcttttaggtactcatctactctacaagaattttggagagccttaacgatatcagtgacgtttattatttcaggaggaaaaaacctaacattgagaatatcggaattaatagcttccagatacagtgattttggcaatagtccgtgtaatccataatccagtaacacgagctggtgcttgctagacaccttttcaatgtttaatttttttgaaataagctttgataaagccttcctcgcaaattccggatacatgaacatgtcggcgacatgattaagtattgttttttcattatttttatattttctcaacaagttctcaataccccaatagatgatagaatatcacccaatgcgtccatgttgtctatttccaacaggtcgctatatccaccaatagaagtttttccaaaaaagattctaggaacagttctaccaccagtaatttgttcaaaataatcccgcaattcattttcgggtttaaattctttaatatcgacaatttcatacgctcctcttttgaaactaaacttatttagaatatccagtgcatttctacaaaaaggacatgtatacttgacaaaaattgtcactttgttattggccaacctttgttgtacaaattcctcggccattttaatatttaagtgatataaaactatctcgacttatttaactctttagtcgagatatatggacgcagatagctatatgatagccaactacagaaggcaaacgctataaaaaacataattacgacgagcatatttataaatatttttattcagcattacttgatatagtaatattaggcacagtcaaacattcaaccactctcgatacattaactctctcattttctttaacaaattctgcaatatcttcgtaaaaagattcttgaaactttttagaatatctatcgactctagatgaaatagcgttcgtcaacatactatgttttgtatacataaaggcgcccattttaacagtttctagtgacaaaatgctagcgatcctaggatcctttagaatcacatagattgacgattcgtctctcttagtaactctagtaaaataatcatacaatctagtacgcgaaataatattatccttgacttgaggagatctaaacaatctagttttgagaacatcgataagttcatcgggaatgacatacatactatctttaatagaactcttttcatccagttgaatggattcgtccttaaccaactgattaatgagatcttctattttatcattttccagatgatatgtatgtccattaaagttaaattgtgtagcgcttctttttagtctagcagccaatactttaacatcactaatatcgatatacaaaggagatgatttatctatggtattaagaattcgtttttcgacatccgtcaaaaccaattcctttttgcctgtatcatccagttttccatcctttgtaaagaaattattttctactagactattaataagactgataaggattcctccataattgcacaatccaaactttttcacaaaactagactttacaagatctacaggaatgcgtacttcaggttttttagcttgtgattttttcttttgcggacattttcttgtgaccaactcatctaccatttcattgattttagcagtgaaataagctttcaatgcacgggcactgatactattgaaaacgagttgatcttcaaattccgccatttaagttcaccaaacaacttttaaatacaaatatatcaatagtagtagaataagaactataaaaaaaataataattaaccaataccaaccccaacaaccggtattattagttgatgtgactgttttctcatcacttagaacagatttaacaatttctataaagtctgtcaaatcatcttccggagaccccataaatacaccaaatatagcggcgtacaacttatccatttatacattgaatattggcttttctttatcgctatcttcatcatattcatcatcaatatcaacaagtcccagattacgagccagatcttcttctacattttcagtcattgatacacgttcactatctccagagagtccgataacgttagccaccacttctctatcaatgattagtttcttgagcgcgaaagtaatttttgtttccgttccggatctatagaagacgataggtgtgataattgccttggccaattgtctttctcttttactgagtgattctagttcaccttctatagatctgagaatggatgattctccagtcgaaacatattctaccatggatccgtttaatttgttgatgaagatggattcatccttaaatgttttctctgtaatagtttccaccgaaagactatgcaaagaatttggaatgcgttccttgtgcttaatgtttccatagacggcttctagaagttgatacaacataggactagccgcggtaacttttatttttagaaagtatccatcgcttctatcttgtttagatttatttttataaagtttagtctctccttccaacataataaaagtggaagtcatttgactagataaactatcagtaagttttatagagatagacgaacaattagcgtattgagaagcatttagtgtaacgtattcgatacattttgcattagatttactaatcgattttgcatactctataacacccgcacaagtctgtagagaatcgctagatgcagtaggtcttggtgaagtttcaactctcttcttgattaccttactcatgattaaacctaaataattgtactttgtaatataatgatatatattttcactttatctcatttgagaataaaaatgtttttgtttaaccactgcatgatgtacagatttcggaatcgcaaaccaccagtggttttattttatccttgtccaatgtgaattgaatgggagcggatgcgggtttcgtacgtagatagtacattcccgtttttagaccgagactccatccgtaaaaatgcatactcgttagtttggaataactcggatctgctatatggatattcatagattgactttgatcgatgaaggctcccctgtctgcagccatttttatgatcgtcttttgtggaatttcccaaatagttttataaactcgcttaatatcttctggaaggtttgtattctgaatggatccaccatctgccataatcctattcttgatctcatcattccataattttctctcggttaaaactctaaggagatgcggattaactacttgaaattctccagacaatactctccgagtgtaaatattactggtatacggttccaccgactcattatttcccaaaatttgagcagttgatgcagtcggcataggtgccaccaataaactatttctaagaccgtatgttctgattttatcttttagaggttcccaattccaaagatccgacggtacaacattccaaagatcatattgtagaataccgttactggcgtacgatcctacatatgtatcgtatggtccttccttctcagctagttcacaactcgcctctaatgcaccgtaataaatggtttcgaagatcttcttatttagatcttgtgcttccaggctatcaaatggataatttaagagaataaacgcgtccgctaatccttgaacaccaataccgataggtctatgtctcttattagagatttcagcttctggaataggataataattaatatctataattttattgagatttctgacaattactttgaccacatccttcagtttgagaaaatcaaatcgcccatctattacaaacatgttcaaggcaacagatgccagattacaaacggctacctcattagcatccgcatattgtattatctcagtgcaaagattactacacttgatagttcctaaattttgttgattactctttttgttacacgcatccttataaagaatgaatggagtaccagtttcaatctgagattctataatcgctttccagacgactcgagcctttattatagatttgtatctcctttctctttcgtatagtgtatacaatcgttcgaactcgtctccccaaacattgtccaatccaggacattcatccggacacatcaacgaccactctccgtcatccttcactcgtttcataaagagatcaggaatccaaagagctataaatagatctctggttctatgttcctcgtttcctgtattctttttaagatcgaggaacgccataatatcagaatgccacggttccaagtatatggccataactccaggccgtttgtttcctccctgatctatgtatctagcggtgttattataaactctcaacattggaataataccgtttgatataccattggtaccggagatatagcttccactggcacgaatattactaattgatagacctattccccctgccattttagagattaatgcgcatcgttttaacgtgtcatagataccctctatgctatcatcgatcatgttaagtagaaaacagctagacatttggtgacgactagttcccgcattaaataaggtaggagaagcgtgcgtaaaccatttttcagaaagtagattgtacgtctcaatagctgagtctatatcccattgatgaattcctactgcgacacgcattaacatgtgctgaggtctttcaacgatcttgttgtttattttcaacaagtaggatttttccaaagttttaaaaccaaaatagttgtatgaaaagtctcgttcgtaaataataaccgagttgagtttatccttatatttgttaactatatccatggtgatacttgaaataatcggagaatgtttcccatttttaggattaacatagttgaataaatcctccatcacttcactaaatagtttttttgtttccttgtgtagatttgatacggctattctggcggctagaatggcataatccggatgttgtgtagtacaagtggctgctatttcggctgccagagtgtccaattctaccgttgttactccattatatattccttgaataaccttcatagctattttaataggatctatatgatccgtgtttaagccataacataattttctaatacgagacgtgattttatcaaacatgacattttccttgtatccatttcgtttaatgacaaacatttttgttggtgtaataaaaaaattatttaacttttcattaatagggatttgacgtatgtagcgtacaaaatgatcgttcctggtatatagataaagagtcctatatatttgaaaatcgttacggctcgattaaactttaatgattgcatagtgaatatatcattaggatttaactccttgactatcatggcggcgccagaaattaccatcaaaagcattaatacagttatgccgatcgcagttaaaacggttatagcatccaccatttatatctaaaaattagatcaaagaatatgtgacaaagtcctagttgtatactgagaattgacgaaacaatgtttcttacatatttttttcttattagtaactgacttaatagtaggaactggaaagctagacttgattattctataagtatagatacccttccagataatgttctctttgataaaagttccagaaaatgtagaattttttaaaaagttatcttttgctattaccaagattgtgtttagacgcttattattaatatgagtgatgaaatccacaccgcctctagatatcgcctttatttccacattagatggtaaatccaatagtgaaactatctttttaggaatgtatggactcgcgtttagaggagtgaacgtcttgggcgtcggaaaggatgattcgtcaaacgaataaacaatttcacaaatggatgttaatgtattagtaggaaattttttgacgctagtggaattgaagattctaatggatgatgttctacctatttcatccgataacatgttaatttccgacaccaacggttttaatatttcgatgatatacggtagtctctctttcggacttatatagcttattccacaatacgagtcattatatactccaaaaaacaaaataactagtataaaatctgtatcgaatgggaaaaacgaaattatcgacataggtatagaatccggaacattgaacgtattaatacttaattctttttctgtggtaagtaccgataggttattgacattgtatggttttaaatattctataacttgagacttgatagatattagtgatgaattgaaaattatttttatcaccacgtgtgtttcaggatcatcgtcgacgcccgtcaaccaaccgaatggagtaaaataaatatcattaatatatgctctagatattagtatttttattaatcctttgattatcatcttctcgtaggcgaatgattccatgatcaagagtgatttgagaacatcctccggagtattaatgggcttagtaaacagtccatcgttgcaataataaaagttatccaagttaaaggatattatgcattcgtttaaagatatcacctcatctgacggagacaattttttggtaggttttagagactttgaagctacttgtttaacaaagttattcatcgtcgtctactattctatttaattttgtagttaatttatcacatatcacattaattgactttttggtccatttttccatacgtttatattcttttaatcctgcgttatccgtttccgttatatccagggatagatcttgcaagttaaatagaatgctcttaaataatgtcattttcttatccgctaaaaatttaaagaatgtataaacctttttcagagatttgaaactcttaggtggtgtcctagtacacaatatcataaacaaactaataaacattccacattcagattccaacagctgattaacttccacattaatacagcctattttcgctccaaatgtacattcgaaaaatctgaataaaacatcgatgtcacaatttgtattatccaatacagaatgtttgtgattcgtgttaaaaccatcggagaaggaatagaaataaaaattattatagtggtggaattcagttggaatattgcctccggagtcataaaaggatactaaacattgttttttatcataaattacacatttccaatgagacaaataacaaaatccaaacattacaaatctagaggtagaacttttaattttgtctttaagtatatacgataagatatgtttattcataaacgcgtcaaatttttcatgaatcgctaaggagtttaagaatctcatgtcaaattgtcctatataatccacttcggatccataagcaaactgagagactaagttcttaatacttcgattgctcatccaggctcctctctcaggctctattttcatcttgacgacctttggattttcaccagtatgtattcctttacgtgataaatcatcgattttcaaatccatttgtgagaagtctatcgccttagatactttttcccgtagtcgaggtttaaaaaaatacgctaacggtatactagtaggtaactcaaagacatcatatatagaatggtaacgcgtctttaactcgtcggttaactctttcttttgatcgagttcgtcgctactattgggtctgctcaggtgccccgactctactagttccaacatcataccgataggaatacaagacactttgccggcggttgtagatttatcatatttttccactacatatccgttacaatttgttaaaaatttagatacatctatattgctacataatccagctagtgaatatatatgacataataaattggtaaatcctagttctggtattttactaattactaaatctgtatatctttccatttatcatggaaaagaatttaccagatatcttcttttttccaaactgcgttaatgtattctcttacaaatattcacaagatgaattcagtaatatgagtaaaacggaacgtgatagtttctcattggccgtgtttccagttataaaacatagatggcataacgcacacgttgtaaaacataaaggaatatacaaagttagtacagaagcacgtggaaaaaaagtatctcctccatcactaggaaaacccgcacacataaacctaaccgcgaagcaatatatatacagtgaacacacaataagctttgaatgttatagttttctaaaatgtataacaaatacagaaatcaattcgttcgatgagtatatattaagaggactattagaagctggtaatagtttacagatattttccaattccgtaggtaaacgaacagatactataggtgtactagggaataagtatccatttagcaaaattccattggcctcattaactcctaaagcacaacgagagatattttcagcgtggatttctcatagacctgtagttttaactggaggaactggagtgggtaagacgtcacaggtacccaagttattgctttggtttaattatttatttggtggattctctactctagataaaatcactgactttcacgaaagaccagtcattctatctcttcctaggatagctttagttagattgcatagcaataccattttaaaatcattgggatttaaggtactagatggatctcctatttctttacggtacggatctataccggaagaattaataaacaaacaaccaaaaaaatatggaattgtattttctacccataagttatctctaacaaaactatttagttatggcactcttattatagacgaagttcatgagcatgatcaaataggagatattattatagcagtagcgagaaagcatcatacgaaaatagattctatgtttttaatgactgccacattagaggatgaccgagaacggctaaaagtatttttacctaatcccgcatttatacatattcctggagatacactgtttaaaattagcgaggtatttattcataataagataaatccatcttccagaatggcatacatagaagaagaaaagagaaatttagttactgctatacagatgtatactcctcctgatggatcatccggtatagtctttgtggcatccgttgcacagtgtcacgaatataaatcatatttagaaaaaagattaccgtatgatatgtatattattcatggtaaggtcttagatatagacgaaatattagaaaaagtgtattcatcacctaatgtatcgataattatttctactccttatttggaatccagcgttactatacgcaatgttacacacatttatgatatgggtagagtttttgtccccgctccttttggaggatcgcaacaatttatttctaaatctatgagagatcaacgaaaaggaagagtaggaagagttaatcctgggacatacgtctatttctatgatctgtcttatatgaagtctatacagcgaatagattcagaatttctacataattatatattgtacgctaataagtttaatctaacactccccgaagatttgtttataatccctacaaatttggatattctatggcgtacaaaggaatatatagactcgttcgatattagtacagaaacatggaataaattattatccaattattatatgaagatgatagagtatgctaaactttatgtactaagtcctattctcgctgaggagttggataactttgagaggacgggagaattaactagtattgtacgagaagccattttatctctaaatttacgaattaagattttaaattttaaacataaagatgatgatacgtatatacacttttgtaaaatattattcggtgtctataacggaacaaacgctactatatattatcatagacctctaacgggatatatgaatatgatttcagatactatatttgttcctgtagataataactaaaaatcaaactctaatgaccacatctttttttagagatgaaaaattttccacatctccttttgtagacacgactaaacattttgcagaaaaaagtttattagtgtttagataatcgtatacttcatcagtgtagatagtaaatgtgaacagataaaaggtattcttgctcaatagattggtaaattccatagaatatattaatcctttcttcttgagatcccacatcatttcaaccagagacgttttatccaatgatttacctcgtactataccacatacaaaactagattttgcagtgacgtcgtacctggtattcctaccaaacaaaattttacttttagttcttttagaaaattctaaggtagaatctctatttgccaatatgtcatctatggaattaccactagcaaaaaatgatagaaatatatattgatacatcgcagctggttttgatctactatactttaaaaacgaatcagattccataattgcctgtatatcatcagctgaaaaactatgttttacacgtattccttcggcatttctttttaatgatatatcttgtttagacaatgataaagttatcatgtccatgagagacgcgtctccgtatcgtataaatatttcattagatgttagacgcttcattaggggtatacttctataaggtttcttaatcagtccatcattggttgcgtcaagaactactatcggatgttgttgggtatctctagtgttacacatggccttactaaagtttgggtaaataactatgatatctctattaattatagatgcatatatttcattcgtcaaggatattagtatcgacttgctatcgtcattaatacgtgtaatgtaatcatataaatcatgcgatagccaaggaaaatttaaatagatgttcatcatataatcgtcgctataattcatattaatacgttgacattgactaatttgtaatatagcctcgccacgaagaaagctctcgtattcagtttcatcgataaaggataccgttaaatataactggttgccgatagtctcatagtctattaagtggtaagtttcgtacaaatacagaatccctaaaatattatctaatgttggattaatctttaccataactgtataaaatggagacggagtcataactattttaccgtttgtacttactggaatagatgaaggaataatctccggacatgctggtaaagacccaaatgtctgtttgaagaaatccaatgttccaggtcctaatctcttaacaaaaattacgatattcgatcccgatatcctttgcattctatttaccagcatatcacgaactatattaagattatctatcatgtctattctcccaccgttatataaatcgcctccgctaagaaacgttagtatatccatacaatggaatacttcatttctaaaatagtattcgttttctaattctttaatgtgaaatcgtatactagaaagggaaaaattatctttgagttttccgttagaaaagaaccacgaaactaatgttctgattgcgtccgattccgttgctgaattaatggatttacaccaaaaactcatataacttctagatgtagaagcattcgctaaaaaattagtagaatcaaaggatataagtagatgttccaacaagtgagcaattcccaagatttcatctatatcattctcgaatccgaaattagaaattcccaagtagatatcctttttcatccgatcgttgatgaaaatacgaactttattcggtaagacaatcatttactaaggagtaaaataggaagtaatgttcgtatgtcgttatcatcgtataaattaaaggtgtgttttttaccattaagtgacattataattttaccaatattggaattataatataggtgtatttgcgcactcgcgacggttgatgcatcggtaaatatagctgtatctaatgttctagtcggtatttcatcatttcgctgtctaataatagcgttttctctatctgtttccattacagctgcctgaagtttattggtcggataatatgtaaaataataagaaatacatacgaataacaaaaataaaataagatataataaagatgccatttagagatctaattttgttcaacttgtccaaattcctacttacagaagatgaggaatcgttggagatagtgtcttccttatgtagaggatttgaaatatcttatgatgacttgataacttactttccagataggaaataccataaatatatttataaagtatttgaacatgtagatttatcggaggaattaagtatggaattccatgatacaactctgagagatttagtctatcttagattgtacaagtattccaagtgtatacggccgtgttataaattaggagataatctaaaaggcatagttgttataaaggacaggaatatttatattagggaagcaaatgatgacttgatagaatatctcctcaaggaatacactcctcagatttatacatattctaatgagcgcgtccccataactggttcaaaattaattctttgtggattttctcaagttacatttatggcgtatacaacgtcgcatataacaacaaataaaaaggtagatgttctcgtttccaaaaaatgtatagatgaactagtcgatccaataaattatcaaatacttcaaaatttatttgataaaggaagcggaacaataaacaaaatactcaggaagatattttattcggtaacaggtggccaaactccataatttgctttttctatttcggattttagaatttccaaattcaccagcgatttatcggttttggtgaaatccaaggatttattaatgtccacaaatgccatttgttttgtctgtggattgtatttgaaaatggaaacgatgtagttagatagatgcgctgcaaagtttcctattagggttccgcgctttacgtcacccagcatacttgaatcaccatcctttaaaaaaaatgataagatatcaacatggagtatatcatactcggattttaattcttctactgcatcactgacattttcacaaatactacaatacggtttaccgaaaataatcagtacgttcttcatttatgggtatcaaaaacttaaaatcgttactgctggaaaataaatcactgacgatattagatgataatttatacaaagtatacaatggaatatttgtggatacaatgagtatttatatagccgtcgccaattgtgtcagaaacttagaagagttaactacggtattcataaaatacgtaaacggatgggtaaaaaagggagggcatgtaaccctttttatcgatagaggaagtataaaaattaaacaagacgttagagacaagagacgtaaatattctaaattaaccaaggacagaaaaatgttagaattagaaaagtgtacatccgaaatacaaaatgttaccggatttatggaagaagaaataaaggcagaaatgcaattaaaaatcgataaactcacatttcaaatatatttatctgattctgataacataaaaatatcattgaatgagatactaacacatttcaacaataatgagaatgttacattattttattgtgatgaacgagacgcagaattcgttatgtgtctcgaggctaaaacacatttctctaccacaggagaatggccgttgataataagtaccgatcaggatactatgctatttgcatctgctgataatcatcctaagatgataaaaaacttaactcaactgtttaaatttgttccctcggcagaggataactatttagcaaaattaacggcgttagtgaatggatgtgatttctttcctggactctatggggcatctataacacccaccaacttaaacaaaatacaattgtttagtgattttacaatcgataatatagtcactagtttggcaattaaaaattattatagaaagactaactctaccgtagacgtgcgtaatattgttacgtttataaacgattacgctaatttagacgatgtctactcgtatattcctccttgtcaatgcactgttcaagaatttatattttccgcattagatgaaaaatggaatgaatttaaatcatcttatttagagaccgttccgttaccctgtcaattaatgtacgcgttagaaccacgtaaggagattgatgtttcagaagttaaaactttatcatcttatatagatttcgaaaatactaaatcagatatcgatgttataaaatctatatcctcgatcttcggatattctaacgaaaactgtaacacgatagtattcggcatctataaggataatttactactgagtataaataattcattttactttaacgatagtctgttaataaccaatactaaaagtgataatataataaatataggttactagattaaaaatggtgttccaactcgtgtgctctacgtgcggcaaagatatttctcacgaacgatataaattgattatacgaaaaaaatcattaaaggatgtactcgtcagtgtaaagaacgaatgttgtaggttaaaattatctacacaaatagaacctcaacgtaacttaacagtgcaacctctattggatataaactaatatggatccggttaattttattaagacatatgcgcctagaggttctattatttttattaattataccatgtcattaacaagtcatttgaatccatcgatagaaaaacatgtgggtatttattatggtacgttattatcggaacacttggtagttgaatctacctatagaaaaggagttcgaatagtcccattggatagtttttttgaaggatatcttagtgcaaaagtatacatgttagagaatattcaagttatgaaaatagcagctgatacgtcattaactttattgggtattccgtatggatttggtcataatagaatgtattgttttaaattggtagctgaatgttataaaaatgccggtgttgaaacatcgtctaaacgaatattgggtaaaaatatttttctgagccaaaacttcacagacgataatagatggataaagatatatgattctaataatttaacattttggcaaattgattaccttaaagggtgagttaatatgcataactactcctccgttgttttttccctcgttctttttcttaacgttgtttgccatcactctcataatgtaaagatattctaaaatggtaaacttttgcatatcggacgcagaaattggtataaatgttgtaattgtattatttcccgtcaatggactagtcacagctccatcagttttatatcctttagagtatttctcactcgtgtctaacattctagagcattccatgatctgtttatcgttgatattggccggaaagatagattttttattttttattatattactattggcaattgtagatataacttctggtaaatatttttctaccttttcaatctcttctattttcaagccggctatatattctgctatattgttgctagtatcaataccttttcttgctaagaagtcatatgtggtattcactatatcagttttaactggtagttccattagcctttccacttctgcagaataatcagaaattggttctttaccagaaaatccagctactataataggctcaccgatgatcattggcaaaatcctatattgtaccagattaatgagagcatatttcatttccaataattctgctagttcttgagacattgatttatttgatgaatctagttggttctctagatactctaccatttctgccgcatacaataacttgttagataaaatcagggttatcaaagtgtttagcgtggctagaatagtgggcttgcatgtattaaagaatgcggtagtatgagtaaaccgttttaacgaattatatagtctccagaaatctgtggcgttacatacatgagccgaatgacatcgaagattgtccaatatttttaatagctgctctttgtccattatttctatatttgactcgcaacaattgtagataccattaatcaccgattcctttttcgatgctggacaatagcacaattgtttagctttggactctatgtattcagaattaatagatatatctctcaatacagattgcactatacattttgaaactatgtcaaaaattgtagaacgacgctgttctgcagccatttaactttaaataatttacaaaaatttaaaatgagcatccgtataaaaatcgataaactgcgccaaattgtggcatatttttcagagttcagtgaagaagtgtctataaatgtagactcgacggatgagttaatgtatatttttgccgccttgggcggatctgtaaacatttgggcaattatacctctaagtgcatcagtgttttaccgaggagccgaaaatattgtgtttaatcttcctgtgtccaaggtaaaatcgtgtttgtgtagttttcacaatgatgccatcatagatatagaacctgatctggaaaataatctagtaaaactttctagttatcatgtagtaagtgtcgattgtaacaaggaactgatgcctattaggacagatactactatttgtctaagtatagatcaaaagaaatcttacgtgtttaattttcacaagtatgaagaaaaatgttgtggtagaaccgtcattcatctagaatggttgttgggctttatcaagtgtattagtcagcatcagcatctggctattatgtttaaagatgacaatattattatgaagactcctggtaatactgatgcgttttccagggaatattctatgactgaatgttctcaagaactacaaaagttttctttcaaaatagctatctcgtctctcaacaaactacgaggattcaaaaagagagtcaatgtttttgaaactagaatcgtaatggataatgacgataacattttaggaatgttgttttcggatagagttcaatcctttaagatcaacatctttatggcgtttttagattaatactttcaatgagataaatatgggtggcggagtaagtgttgagctccctaaacgggatccgcctccgggagtacccactgatgagatgttattaaacgtggataaaatgcatgacgtgatagctcccgctaagcttttagaatatgtgcatataggaccactagcaaaagataaagaggataaagtaaagaaaagatatccagagtttagattagtcaacacaggacccggtggtctttcggcattgttaagacaatcgtataatggaaccgcacccaattgctgtcgcacttttaatcgtactcattattggaagaaggatggaaagatatcagataagtatgaagagggtgcagtattagaatcgtgttggccagacgttcacgacactggaaaatgcgatgttgatttattcgactggtgtcagggggatacgttcgatagaaacatatgccatcagtggatcggttcagcctttaataggagtaatagaactgtagagggtcaacaatcgttaataaatctgtataataagatgcaaacattatgtagtaaagatgctagtgtaccaatatgcgaatcatttttgcattatttacgcgcacacaatacagaagatagcaaagagatgatcgattatattctaagacaacagtctgcggactttaaacagaaatatatgagatgtagttatcccactagagataagttagaagagtcattaaaatatgcggaacctcgagaatgttgggatccagagtgttcgaatgccaatgttaatttcttactaacacgtaattataataatttaggactttgcaatattgtacgatgtaataccagcgtgaacaacttacagatggataaaacttcctcattaagattgtcatgtggattaagcaatagtgatagattttctactgttcccgtcaatagagcaaaagtagttcaacataatattaaacactcgttcgacctaaaattgcatttgatcagtttattatctctcttggtaatatggatactaattgtagctatttaaatgggtgccgcggcaagcatacagacgacggtgaatacactcagcgaacgtatctcgtctaaattagaacaagaagcgaacgctagtgctcaaacaaaatgtgatatagaaatcggaaatttttatatccgacaaaaccatggatgtaacctcactgttaaaaatatgtgctctgcggacgcggatgctcagttggatgctgtgttatcagccgctacagaaacatatagtggattaacaccggaacaaaaagcatacgtgccagctatgtttactgctgcgttaaacattcagacgagtgtaaacactgttgttagagattttgaaaattatgtgaaacagacttgtaattctagcgcggtcgtcgataacaaattaaagatacaaaacgtaatcatagatgaatgttacggagccccaggatctccaacaaatttggaatttattaatacaggatctagcaaaggaaattgtgccattaaagcgttgatgcaattgacgactaaggccactactcaaatagcacctagacaagttgctggtacaggagttcagttttatatgattgttatcggtgttataatattggcagcgttgtttatgtactatgccaagcgtatgttgttcacatccaccaatgataaaatcaaacttattttagccaataaggaaaacgtccattggactacttacatggacacattctttagaacttctccgatggttattgctaccacggatatgcaaaactgaaaatatattgataatattttaatagattaacatggaagttatcgctgatcgtctagacgatatagtgaaacaaaatatagcggatgaaaaatttgtagattttgttatacacggtctagagcatcaatgtcctgctatacttcgaccattaattaggttgtttattgatatactattatttgttatagtaatttatatttttacggtacgtctagtaagtagaaattatcaaatgttgttggtggtgctagtcatcacattaactattttttattactttatactataatagtactagactgacttctaacaaacatctcacctgccataaataaatgcttgatattaaagtcttctatttctaacactattccatctgtggaaaataatactctgacattatcgctaattgacacatcggtgagtgatatgcctataaagtaataatcttctttgggcacatataccagtgtaccaggttctaacaacctatttactggtgctcctgtagcatactttttctttaccttgagaatatccatcgtttgcttggtcaatagcgatatgtgattttttatcaaccactcaaaaaagtaattggagtgttcatatcctctacgggctattgtctcatggccgtgtatgaaatttaagtaacacgactgtggtagatttgttctatagagccgattgccgcaaatagatagaactaccaatatgtctgtacaaatgttaaacattaattgattaacagaaaaaacaatgttcgttctgggaatagaaaccagatcaaaacaaaattcgttagaatatatgccacgtttatacatggaatataaaataactacagtttgaaaaataacagtatcatttaaacatttaacttgcggggttaatctcacaactttactgtttttgaactgttcaaaatatagcatcgatccgtgagaaatacgtttagccgcctttaatagaggaaatcccaccgcctttctggatctcaccaacgacgatagttctgaccagcaactcatttcttcatcatccacctgttttaacatataataggcaggagatagatatccgtcattgcaatattccttctcgtaggcacacaatctaatattgataaaatctccattctcttctctgcatttattatcttgtctcggtggctgattaggctgtggtcttggtttaggccttggtctatcgttgttgaatctattttggtcattaaatctttcatttcttcctggtatatttctatcacctcgtttggttggatttttgtctatattatcgtttgtaacatcggtacgggtattcatttatcacaaaaaaaacttctctaaatgagtctactgctagaaaacctcatcgaagaagataccatattttttgcaggaagtatatctgagtatgatgatttacaaatggttattgccggcgcaaaatccaaatttccaagatctatgctttctatttttaatatagtacctagaacgatgtcaaaatatgagttggagttgattcataacgaaaatatcacaggagcaatgtttaccacaatgtataatataagaaacaatttgggtctaggagatgataaactaactattgaagccattgaaaactatttcttggatcctaacaatgaagttatgcctcttattattaataatacggatatgactgccgtcattcctaaaaaaagtggtaggagaaagaataagaacatggttatcttccgtcaaggatcatcacctatcttgtgcattttcgaaactcgtaaaaagattaatatttataaagaaaatatggaatccgcgtcgactgagtatacacctatcggagacaacaaggctttgatatctaaatatgcgggaattaatgtcctgaatgtgtattctccttccacatccataagattgaatgccatttacggattcaccaataaaaataaactagagaaacttagtactaataaggaactagaatcgtatagttctagccctcttcaagaacccattaggttaaatgattttctgggactattggaatgtgttaaaaagaatattcctctaacagatattccgacaaaggattgattactataaatggagaatgttcctaatgtatactttaatcctgtgtttatagagcccacgtttaaacattctttattaagtgtttataaacacagattaatagttttatttgaagtattcgttgtattcattctaatatatgtattttttagatctgaattaaatatgttcttcatgcctaaacgaaaaatacccgatcctattgatagattacgacgtgctaatctagcgtgtgaagacgataaattaatgatctatggattaccatggatgacaactcaaacatctgcgttatcaataaatagtaaaccgatagtgtataaagattgtgcaaagcttttgcgatcaataaatggatcacaaccagtatctcttaacgatgttcttcgcagatgatgattcattttttaagtatttggctagtcaagatgatgaatcttcattatctgatatattgcaaatcactcaatatctagactttctgttattattattgatccaatcaaaaaataaattagaagccgtgggtcattgttatgaatctctttcagaggaatacagacaattgacaaaattcacagactttcaagattttaaaaaactgtttaacaaggtccctattgttacagatggaagggtcaaacttaataaaggatatttgttcgactttgtgattagtttgatgcgattcaaaaaagaatcctctctagctaccaccgcaatagatcctgttagatacatagatcctcgtcgcgatatcgcattttctaacgtgatggatatattaaagtcgaataaagtgaacaataattaattctttattgtcatcatgaacggcggacatattcagttgataatcggccccatgttttcaggtaaaagtacagaattaattagacgagttagacgttatcaaatagctcaatataaatgcgtgactataaaatattctaacgataatagatacggaacgggactatggacgcatgataagaataattttgaagcattggaagcaactaaactatgtgatgtcttggaatcaattacagatttctccgtgataggtatcgatgaaggacagttctttccagacattgtttaattctgtgagcgtatggcaaacgaaggaaaaatagttatagtagccgcactcgatgggacatttcaacgtaaaccgtttaataatattttgaatcttattccattatctgaaatggtggtaaaactaactgctgtgtgtatgaaatgctttaaggaggcttccttttctaaacgattgggtgaggaaaccgagatagagataataggaggtaatgatatgtatcaatcggtgtgtagaaagtgttacgtcggctcataatattatattttttatctaaaaaactaaaaataaacattgattaaattttaatataatacttaaaaatggatgttgtgtcgttagataaaccgtttatgtattttgaggaaattgataatgagttagattacgaaccagaaagtgcaaatgaggtcgcaaaaaaactgccgtatcaaggacagttaaaactattactaggagaattattttttcttagtaagttacagcgacacggtatattagatggtgccaccgtagtgtatataggatcggctcctggtacacatatacgttatttgagagatcatttctataatttaggagtgatcatcaaatggatgctaattgacggccgccatcatgatcctattttaaatggattgcgtgatgtaactctagtgactcggttcgttgatgaggaatatctacgatccatcaaaaaacaactgcatccttctaagattattttaatttctgatgtaagatccaaacgaggaggaaatgaacctagtacggcggatttactaagtaattacgctctacaaaatgtcatgattagtattttaaaccccgtggcatctagtcttaaatggagatgcccgtttccagatcaatggatcaaggacttttatatcccacacggtaataaaatgttacaaccttttgctccttcatattcagctgaaatgagattattaagtatttataccggtgagaacatgagactgactcgagttaccaaattagacgctgtaaattatgaaaaaaagatgtactaccttaataagatcgtccgtaacaaagtagttgttaactttgattatcctaatcaggaatatgactattttcacatgtactttatgctgaggaccgtgtactgcaataaaacatttcctactactaaagcaaaggtactatttctacaacaatctatatttcgtttcttaaatattccaacaacatcaactgaaaaagttagtcatgaaccaatacaacgtaaaatatctagcaaaaattctatgtctaaaaacagaaatagcaagagatccgtacgcagtaataaatagaaacgtactactgagatatactaccgatatagagtataatgatttagttactttaataaccgttagacataaaattgattctatgaaaactgtgtttcaggtatttaacgaatcatccataaattatactccggttgatgatgattatggagaaccaatcattataacatcgtatcttcaaaaaggtcataacaagtttcctgtaaattttctatacatagatgtggtaatatctgacttatttcctagctttgttagactagatactacagaaactaatatagttaatagtgtactacaaacaggcgatggtaaaaagactcttcgtcttcccaaaatgttagagacggaaatagttgtcaagattctctatcgccctaatataccattaaaaattgttagatttttccgcaataacatggtaactggagtagagatagccgatagatctgttatttcagtcgctgattaatcaattagtagagatgagataagaacattataataatcaataatatatcttatatcttatatcttatatcttatatcttgtttagaaaaatgctaatattaaaatagctaacgctagtaatccaatcggaagccatttgatatctataatagggtatctaatttcctgatttaaatagcggacagctatattctcggtagctactcgtttggaatcacaaacattatttacatctaatttactatctgtaatggaaacgtttcccaatgaaatggtacaatccgatacattgcattttgttatatttttttttaaagaggctggtaacaacgcatcgcttcgtttacatggctcgtaccaacaataatagggtaatcttgtatctattcctatccgtactatgcttttatcaggataaatacatttacatcgtatatcgtctttgttagcatcacagaatgcataaatttgttcgtccgtcatgataaaaatttaaagtgtaaatataactattatttttatagttgtaataaaaagggaaatttgattgtatactttcggttctttaaaagaaactgacttgataaaaatggctgtaatctctaaggttacgtatagtctatatgatcaaaaagagattaatgctacagatattatcattagtcatgttaaaaatgacgacgatatcggtaccgttaaagatggtagactaggtgctatggatggggcattatgtaagacttgtgggaaaacggaattggaatgtttcggtcactggggtaaagtaagtatttataaaactcatatagttaagcctgaatttatttcagaaattattcgtttactgaatcatatatgtattcactgcggattattgcgttcacgagaaccgtattccgacgatattaacctaaaagagttatcgggacacgctcttaggagattaaaggataaaatattatccaagaaaaagtcatgttggaacagtgaatgtatgcaaccgtatcaaaaaattactttttcaaagaaaaaggtttgtttcgtcaacaagttggatgatattaacgttcctaattctctcatctatcaaaagttaatttctattcatgaaaagttttggccattattagaaattcatcaatatccagctaacttattttatacagactactttcccatccctccgttgattattagaccggctattagtttttggatagatagtatacccaaagagaccaatgaattaacttacttattaggtatgatcgttaagaattgtaacttgaatgctgatgaacaggttatccagaaggcggtaatagaatacgatgatattaaaattatttctaataacactaccagtatcaatttatcatatattacatccggcaaaaataatatgattagaagttatatcgtcgcccgacgaaaagatcagaccgctagatctgtaattggtcccagtacatctatcaccgttaatgaggtaggaatgcccgcatatattagaaatacacttacagaaaagatatttgttaatgcctttacagtggataaagttaaacaactattagcgtcaaaccaagttaaattttactttaataaacgattaaaccaattaacaagaatacgccaaggaaagtttattaaaaataaaatacatttattgcctggtgattgggtagaagtagctgttcaagaatatacaagtattatttttggaagacagccgtctctacatagatacaacgtcatcgcttcatctatcagagctaccgaaggagatactatcaaaatatctcccggaattgccaactctcaaaatgctgatttcgacggggatgaggaatggatgatattagaacaaaatcctaaagctgtaattgaacaaagtattcttatgtatccgacgacgttactcaaacacgatattcatggagcccccgtttatggatctattcaagatgaaatcgtagcagcgtattcattgtttaggatacaagatctttgtttagatgaagtattgaacatcttggggaaatatggaagagagttcgatcctaaaggtaaatgtaaattcagcggtaaagatatctatacttacttgataggtgaaaagattaattatccgggtctcttaaaggatggtgaaattattgcaaacgacgtagatagtaattttgttgtggctatgaggcatctgtcattggctggactcttatccgatcataagtcgaacgtggaaggtatcaactttattatcaagtcatcttatgtttttaagagatatctatctatttacggttttggggtgacattcaaagatctgagaccaaattcgacgttcactaataaattggaggccatcaacgtagaaaaaatagaacttatcaaagaagcatacgccaaatatctcaacgatgtaagagacgggaaaatagttccattatctaaagctttagaggcggactatgtggaatccatgttatccaacttgacaaatcttaatatccgagagatagaagaacatatgagacaaacgctgatagatgatccagataataacctcctgaaaatggccaaagcgggttataaagtaaatcccacagaactaatgtatattctaggtacgtatggacaacaaaggattgatggtgaaccagcagagactcgagtattgggtagagttttaccttactatcttccagactctaaggatccagaaggaagaggttatattcttaattctttaacaaaaggattaacgggttctcaatattacttttcgatgctggttgccagatctcaatctactgatatcgtctgtgaaacatcacgtaccggaacactggctagaaaaatcattaaaaagatggaggatatggtggtcgacggatacggacaagtagttataggtaatacgctcatcaagtacgccgccaattataccaaaattctaggctcagtatgtaaacctgtagatcttatctatccagatgagtccatgacttggtatttggaaattagtgctctgtggaataaaataaaacagggattcgtttactctcagaaacagaaacttgcaaagaagacattggcgccgtttaatttcctagtattcgtcaaacccaccactgaggataatgctattaaggttaaggatctgtacgatatgattcataacgtcattgatgatgtgagagagaaatacttctttacggtatctaatatagattttatggagtatatattcttgacgcatcttaatccttctagaattagaattacaaaagaaacggctatcactatctttgaaaagttctatgaaaaactcaattatactctaggtggtggaactcctattggaattatttctgcacaggtattgtctgagaagtttacacaacaagccctgtccagttttcacactactgaaaaaagtggtgccgtcaaacaaaaacttggtttcaacgagtttaataacttgactaatttgagtaagaataagaccgaaattatcactctggtatccgatgatatctctaaacttcaatctgttaagattaatttcgaatttgtatgtttgggagaattaaatccagacatcactcttcgaaaagaaacagataggtatgtagtagatataatagtcaatagattatacatcaagagagcagaaataaccgaattagtcgtcgaatatatgattgaacgatttatctcctttagcgtcattgtaaaggaatggggtatggaaacattcattgaggatgaggataatattagatttactgtctacctaaatttcgttgaaccggaagaattgaatcttagtaagtttatgatggttcttccgggtgccgccaacaagggaaagattagtaaattcaagattcctatctctgactatacgggttatgacgacttcaatcaaacaaaaaagctcaataagatgactgtagaactcatgaatctaaaagaattgggttctttcgatttggaaaacgtcaacgtgtatcctggagtatggaatacatacgatatcttcggtatcgaggccgctcgtgaatacttgtgcgaagccatgttaaacacctatggagaagggttcgattatctgtatcagccttgtgatcttctcgctagtttactatgtgctagttacgaaccagaatcagtgaataaattcaagttcggcgcagctagtactcttaagagagctacgttcggagacaataaagcattgttaaacgcggctcttcataaaaagtcagaacctattaacgataatagtagctgccacttttttagcaaggtccctaatataggaactggatattacaaatactttatcgacttgggtcttctcatgagaatggaaaggaaactatctgataagatatcttctcaaaagatcaaggaaatggaagaaacagaagacttttaattcttatcaataacatatttttctatgatctgtcttttaaacgatggattttccacaaatgcgcctctcaagtccctcatagaatgatacacgtataaaaaatatagcataggcgatgactccttatttttagacattagatatgccaaaatcatagccccgcttctatttactcccgcagcacaatgaaccaacacgggctcgtttcgttgatcacatttagataaaaaggcggttacgtcgtcaaaatatttactaatatcggtagttgtatcatctaccaacggtatatgaataatattaatattagagttaggtaatgtatatttatccatcgtcaaatttaaaacatatttgaacttaacttcagatgatggtgcatccatagcatttttataatttcccaaatacacattattggttacccttgtcattatagtgggagatttggctttgtgcatatctccagttgaacgtagtagtaagtatttatacaaacttttcttatccatttataacgtacaaatggataaaactactttatcggtaaacgcgtgtaatttagaatacgttagagaaaaggctatagtaggcgtacaagcagccaaaacatcaacacttatattctttgttattatattggcaattagtgcgctattactctggtttcagacgtctgataatccagtctttaatgaattaacgagatatatgcgaattaaaaatacggttaacgattggaaatcattaacggatagcaaaacaaaattagaaagtgatagaggtagacttctagccgctggtaaggatgatatattcgacttcaaatgtgtggatttcggcgcctattttatagctatgcgattggataagaaaacatatctgccgcaagctattaggcgaggtactggagacgcgtggatggttaaaaaggcggcaaaggtcgatccatctgctcaacaattttgtcagtatttgataaaacacaagtctaataatgttattacttgtggtaatgagatgttaaatgaattaggttatagcggttattttatgtcaccgcattggtgttccgattttagtaatatggaatagtgttagataaatgcggtaacgaatgttcctgtaaggaaccataacagcttagatttaacgttaaagatgagcataaacataataaacaaaattacaatcaaacttataacattaatatcaaacaatccaaaaaatgaaatcagtggagtagtaaacgcgtacataactcctggataacgtttagcagctgccgttcctattctagaccaaaaatttggtttcatgttttcgaaacggtattctgcaacaagtcggggatcgtgttctacatatttggcggcattatccagtatctgcctattgatcttcatttcgttttcgattctggctatttcaaaataaaatcccgatgatagacctccagactttataatttcatctacgatgttcagcgccgtagtaactctaataatataggctgataagctaacatcataccctcctgtatatgtgaatatggcatgatttttgtccattacaagctcggttttaactttattgcctgtaataatttctctcatctgtaggatatctatttttttgtcatgcattgccttcaagacgggacgaagaaacgtaatatcctcaataacgttatcgttttctacaataactacatattctacctttttattttctaactcggtaaaaaaattagaatcccatagggctaaatgtctagcgatatttcttttcgtttcttctgtacacatagtgttacaaaaccctgaaaagaagtgagtatacttgtcatcatttctaatgtttcctccagtccactgtataaacgcataatccttgtaatgatctggatcatccttgactaccacaacatttcttttttctggcataacttcgttgtcctttacatcatcgaacttctgatcattaatatgctcatgaacattaggaaatgtttctgatggaggtctatcaataactggcacaacaataacaggagttttcaccgccgccatttagttattgaaattaatcatatacaactctttaatacgagttatattttcgtctatccattgtttcacattgacatatttcgacaaaaagatataaaatgcgtattccaatgcttctctgtttaatgaattactaaaatatacaaacacgtcactgtctggcaataaatgatatcttagaatattgtaacaatttattttgtattgcacatgttcgtgatctatgagttcttcttcgaatggcataggatctccgaatctgaaaacgtataaataggagttagaataataatatttgagagtattggtaatatataaactctttagcggtataattagtttttttctctcaatttctatttttagatgtgatggaaaaatgactaattttgtagcattagtatcatgaactctaatcaaaatcttaatatcttcgtcacacgttagctctttgaagtttttaagagatgcatcagttggttctacagatggagtaggtgcaacaattttttgttctacacatgtatgtactggagccattgttttaactataatggtgcttgtatcgaaaaactttaatgcagatagcggaagctcttcgccgcgactttctacgtcgtaattgggttctaacgccgatctctgaatggatactagttttctaagttctaatgtgattctctgaaaatgtaaatccaattcctccggcattatagatgtgtatacatcggtaaataaaactatagtatccaacgatcccttctcgcaaattctagtcttaaccaaaaaatcgtatataaccacggagatggcgtatttaagagtggattcttctaccgttttgttcttggatgtcatataggaaactataaagtccgcactactgttaagaatgattactaacgcaactatatagtttaaattaagcattttggaaacataaaataactctgtagacgatacttgactttcgaataagtttgcagacaaacgaagaaagaacagacctctcttaatttcagaagaaaactttttttcgtattcctgacgtctagagtttatatcaataagaaagttaagaattagtcggttaatgttgtatttcattacccaagtttgagatttcataatattatcaaaagacatgataatattaaagataaagcgctgactatgaacgaaatagctatatggttcgctcaagaatatagtcttgttaaacgtggaaacgataactgtatttttaatcacgtcagcggcatctaaattaaatataggtatatttattccacacactctacaatatgccacaccatcttcataataaataaattcgttagcaaaattattaattttagtgaaatagttagcgtcaactttcatagcttccttcaatctaatttgatgctcacacggtgcgaattccactctaacatcccttttccatgcctcaggttcatcgatctctataatatctagttttttgcgtttcacaaacacaggctcgtctctcgcgatgagatctgtatagtaactatgtaaatgataactagatagaaagatgtagctatatagatgacgatcctttaagagaggtataataactttaccccaatcagatagactgttgttatggtcttcggaaaaagaatttttataaatttttccagtattttccaaatatacgtacttaacatctaaaaaatccttaatgataataggaatggataatccgtctattttataaagaaatacatatcgcacattatacttttttttggaaatgggaataccgatgtgtctacataaatatgcaaagtctaaatattttttagagaatcttagttggtccaaattcttttccaagtacggtaatagatttttcatattgaacggtatcttcttaatctctggttctagttccgcattaaatgatgaaactaagtcactatttttataactaacgattacatcacctctaacatcatcatttaccagaatactgatcttcttttgtcgtaaatacatgtctaatgtgttaaaaaaaagatcatacaagttatacgtcatttcatctgtggtattcttgtcattgaaggataaactcgtactaatctcttctttaacagcctgttcaaatttatatcctatatacgaaaaaatagcaaccagtgtttgatcatccgcgtcaatattctgttctatcgtagtgtataacaatcgtatatcttcttctgtgatagtcgatacgttataaaggttgataacgaaaatatttttatttcgtgaaataaagtcatcgtaggattttggacttatattcgcgtctagtagatatgcttttatttttggaatgatctcaattagaatagtctctttagagtccatttaaagttacaaacaactaggaaattggtttatgatgtataatttttttagtttttatagattctttattctatacttaaaaaatgaaaataaatacaaaggttcttgagggttgtgttaaattgaaagcgagaaataatcataaattatttcattatcgcgatatccgttaagtttgtatcgtaatggcgtggtcaattacgaataaagcggatactagtagcttcacaaagatggctgaaatcagagctcatctaaaaaatagcgctgaaaataaagataaaaacgaggatattttcccggaagatgtaataattccatctactaagcccaaaaccaaacgagccactactcctcgtaaaccagcggctactaaaagatcaaccaaaaaggaggaagtggaagaagaagtagttatagaggaatatcatcaaacaactgaaaaaaattctccatctcctggagtcagcgacattgtagaaagcgtggctgctgtagagctcgatgatagcgacggggatgatgaacctatggtacaagttgaagctggtaaagtaaatcatagtgctagaagcgatctttctgacctaaaggtggctaccgacaatatcgttaaagatcttaagaaaattattactagaatctctgcagtatcgacggttctagaggatgttcaagcagctggtatctctagacaatttacttctatgactaaagctattacaacactatctgatctagtcaccgagggaaaatctaaagttgttcgtaaaaaagttaaaacttgtaagaagtaaatgcgtgcacttttttataaagatggtaaactctttaccgataataattttttaaatcctgtatcagacgataatccagcgtatgaggttttgcaacatgttaaaattcctactcatttaacagatgtagtagtatatgaacaaacgtgggaggaggcgttaactagattaatttttgtgggaagcgattcaaaaggacgtagacaatacttttacggaaaaatgcatgtacagaatcgcaacgctaaaagagatcgtatttttgttagagtatataacgttatgaaacgaattaattgttttataaacaaaaatataaagaaatcgtccacagattccaattatcagttggcggtttttatgttaatggaaactatgttttttattagatttggtaaaatgaaatatcttaaggagaatgaaacagtagggttattaacactaaaaaataaacacatagaaataagtcccgatgaaatagttatcaagtttgtaggaaaggacaaagtttcacatgaatttgttgttcataagtctaatagactatataaaccgctattgaaactgacggatgattctagtcccgaagaatttctgttcaacaaactaagtgaacgaaaggtatacgaatgtatcaaacagtttggtattagaatcaaggatctccgaacgtatggagtcaattatacgtttttatataatttttggacaaatgtaaagtccatatctcctcttccgtcaccaaaaaagttaatagcgttaactatcaaacaaactgctgaagtggtaggtcatactccatcaatttcaaaaagagcttatatggcaacgactattttagaaatggtaaaggataaaaattttttagatgtagtatctaaaactacgttcgatgaattcctatctatagtcgtagatcacgttaaatcatctacggatggatgatatagatctttacacaaataattacaagaccgataaatggaaatggataagcgtatgaaatctctcgcaatgacagctttcttcggagagctaagcacattagatattatggcattgataatgtctatatttaaacgccatccaaacaataccattttttcagtggataaggatggtcagtttatgattgatttcgaatacgataattataaggcttctcaatatttggatctgaccctcactccgatatctggagatgaatgcaagactcacgcatcgagtatagccgaacaattggcgtgtgtggatattattaaagaggatattagcgaatatatcaaaactactccccgtcttaaacgatttataaaaaaataccgcaatagatcagatactcgcatcagtcgagatacagaaaagcttaaaatagctctagctaaaggcatagattacgaatatataaaagacgcttgttaataagtaaatgaaaaaaaactagtcgtttataataaaacacgatatggatgccaacgtagtatcatcttctactattgcgacgtatatagacgctttagcgaagaatgcttcagaattagaacagaggtctaccgcatacgaaataaataatgaattggaactagtatttattaagccgccattgattactttgacaaatgtagtgaatatctctacgattcaggaatcgtttattcgatttaccgttactaataaggaaggtgttaaaattagaactaagattccattatctaaggtacatggtctagatgtaaaaaatgtacagttagtagatgctatagataacatagtttgggaaaagaaatcattagtgacggaaaatcgtcttcacaaagaatgcttgttgagactatcgacagaggaacgtcatatatttttggattacaagaaatatggatcctctatccgactagaattagtcaatcttattcaagcaaaaacaaaaaactttacgatagactttaagctaaaatattttctaggatccggtgcccaatctaaaagttctttgttgcacgctattaatcatccaaagtcaaggcctaatacatctctggaaatagaattcacacctagagacaatgaaacagttccatatgatgaactaataaaggaattgacgactctctcgcgtcatatatttatggcttctccagagaatgtaattctttctccgcctattaacgcgcctataaaaacctttatgttgcctaaacaagatatagtaggtttggatctggaaaatctatatgccgtaactaagactgacggcattcctataactatcagagttacatcaaacgggttgtattgttattttacacatcttggttatattattagatatcctgttaagagaataatagattccgaagtagtagtctttggtgaggcagttaaggataagaactggaccgtatatctcattaagctaatagagcccgtgaatgcaatcagtgatagactagaagaaagtaagtatgttgaatctaaactagtggatatttgtgatcggatagtattcaagtcaaagaaatacgaaggtccgtttactacaactagtgaagtcgtcgatatgttatctacatatttaccaaagcaaccagaaggtgttattctgttctattcaaagggacctaaatctaacattgattttaaaattaaaaaggaaaatactatagaccaaactgcaaatgtagtatttaggtacatgtccagtgaaccaattatctttggagaatcgtctatctttgtagagtataagaaatttagcaacgataaaggctttcctaaagaatatggttctggtaagattgtgttatataacggcgttaattatctaaataatatctattgtttggaatatattaatacacataatgaagtgggtattaagtccgtggttgtacctattaagtttatagcagaattcttagttaatggagaaatacttaaacctagaattgataaaaccatgaaatatattaactcagaagattattatggaaatcaacataatatcatagtcgaacatttaagagatcaaagcatcaaaataggagatatctttaacgaggataaactatcggatgtgggacatcaatacgccaataatgataaatttagattaaatccagaagttagttattttacgaataaacgaactagaggaccgttgggaattttatcaaactacgtcaagactcttcttatttctatgtattgttccaaaacatttttagacgattccaacaaacgaaaggtattggcgattgattttggaaacggtgctgacctggaaaaatacttttatggagagattgcgttattggtagcgacggatccggatgctgatgctatagctagaggaaatgaaagatacaacaaattaaactctggaattaaaaccaagtactacaaatttgactacattcaggaaactattcgatccgatacatttgtctctagtgtcagagaagtattctattttggaaagtttaatatcatcgactggcagtttgctatccattattcttttcatccgagacattatgctaccgtcatgaataacttatccgaactaactgcttctggaggcaaggtattaatcactaccatggacggagacaaattatcaaaattaacagataaaaagacttttataattcataagaatttacctagtagcgaaaactatatgtctgtagaaaaaatagctgatgatagaatagtggtatataatccatcaacaatgtctactccaatgactgaatacattatcaaaaagaacgatatagtcagagtgtttaacgaatacggatttgttcttgtagataacgttgatttcgctacaattatagaacgaagtaaaaagtttattaatggcgcatctacaatggaagatagaccgtctacaaaaaactttttcgaactaaatagaggagccattaaatgtgaaggtttagatgtcgaagacttacttagttactatgttgtttatgtcttttctaagcggtaaataataatatggtatgggttctgatatccccgttctaaatgcattaaataattccaatagagcgatttttgttcctataggaccttccaactgtggatactctgtattgttaatagatatattaatacttttgtcgggtaacagaggttctacgtcttctaaaaataaaagttttataacatctggcctgttcataaataaaaacttggcgattctatatatactcttattatcaaatctagccattgtcttatagatgtgagctactgtaggtgtaccatttgattttctttctaatactatatatttctctcgaagaagttcttgcacatcatctgggaataaaatactactgttgagtaaatcagttattttttttatatcgatattgatggacatttttatagttaaggataataagtatcccaaagtcgataacgacgataacgaagtatttatacttttaggaaatcacaatgactttatcagattaaaattaacaaaattaaaggagcatgtatttttttctgaatatattgtgactccagatacatatggatctttatgcgtcgaattaaatgggtctagttttcagcacggtggtagatatataaaggtggaggaatttatagatgctggaagacaagttagatggtgttctacatccaatcatatatctaaagatatacccgaagatatgcacactgataaatttgtcatttatgatatatacacttttgacgctttcaagaataaacgattggtattcgtacaggtacctccgtcgttaggagatgatagtcatttgactaatccgttattgtctccgtattatcgtaattcagtagccagacaaatggtcaataatatgatttttaatcaagattcatttttaaaatatttattagaacatctgattagaagccactatagagtttctaaacatataacaatagttagatacaaggataccgaagaattaaatctaacgagaatatgttataatagagataagtttaaggcgtttgtattcgcttggtttaacggcgtttcggaaaatgaaaaggtactagatacgtataaaaaggtatctaatttgatataatgaattcagtgactgtatcacacgcgccatatactattacttatcacgatgattgggaaccagtaatgagtcaattggtagagttttataacgaagtagccagttggctgctacgagacgagacgtcgcctattcctgataagttctttatacagttgaaacaaccgcttagaaataaacgagtatgtgtgtgcggtatagatccgtatccgaaagatggaactggtgtaccgttcgaatcaccaaattttacaaaaaaatcaattaaggagatagcttcatctatatctagattaaccggagtaattgattataaaggttataaccttaatataatagacggggttataccctggaattattacttaagttgtaaattaggagaaacaaaaagtcacgcgatctactgggataagatttccaagttactgctgcagcatataactaaacacgttagtgttctttattgtttgggtaaaacagatttctcgaatatacgggcaaagttagaatccccggtaactaccatagtcggatatcatccagcggctagagaccgccaattcgagaaagatagatcatttgaaattatcaacgttttactggaattagacaacaaggcacctataaattgggctcaagggtttatttattaatgctttagtgaaattttaacttgtgttctaaatggatgcggctattagaggtaatgatgttatctttgttcttaagactataggtgtcccgtcagcgtgcagacaaaatgaagatccaagatttgtagaagcatttaaatgcgacgagttagaaagatatattgagaataatccagaatgtacactattcgaaagtcttagggatgaggaagcatactctatagtcagaattttcatggatgtagatttagacgcgtgtctagacgaaatagattatttaacggctattcaagattttattatcgaggtgtcaaactgtgtagctagattcgcgtttacagaatgcggtgccattcatgaaaatgtaataaaatccatgagatctaatttttcattgactaagtctacaaatagagataaaacaagttttcatattatctttttagacacgtataccactatggatacattgatagctatgaaacgaacactattagaattaagtagatcatctgaaaatccactaacaagatcgatagacactgccgtatataggagaaaaacaactcttcgggttgtaggtactaggaaaaatccaaattgcgacactattcatgtaatgcaaccaccgcatgataatatagaagattacctattcacttacgtggatatgaacaacaatagttattacttttctctacaacaacgattggaggatttagttcctgataagttatgggaaccagggtttatttcattcgaagacgctataaaaagagtttcaaaaatattcattaattctataataaactttaatgatctcgatgaaaataattttacaacggtaccactggtcatagattacgtaacaccttgtgcattatgtaaaaaacgatcgcataaacatccgcatcaactatcgttggaaaatggtgctattagaatttacaaaactggtaatccacatagttgtaaagttaaaattgttccgttggatggtaataaactgtttaatattgcacaaagaattttagacactaactctgttttattaaccgaacgaggagaccatatagtttggattaataattcatggaaatttaacagcgaagaacccttgataacaaaactaattttgtcaataagacatcaactacctaaggaatattcaagcgaattactctgtccgaggaaacgaaagactgtagaagctaacatacgagacatgttagtagattcagtggagaccgatacctatccggataaacttccgtttaaaaatggtgtattggacctggtagacggaatgttttactctggagatgatgctaaaaaatatacgtgtactgtatcaaccggatttaaatttgacgatacaaagttcgtcgaagacagtccagaaatggaagagttaatgaatatcattaacgatatccaaccattaacggatgaaaataagaaaaatagagagctatatgaaaaaacattatctagttgtttatgcggtgctaccaaaggatgtttaacattcttttttggagaaactgcaactggaaagtcgacaaccaaacgtttgttaaagtctgctatcggtgacctgtttgttgagacgggtcaaacaattttaacagatgtattggataaaggacctaatccatttatcgctaacatgcatttgaaaagatctgtattctgtagcgaactacctgattttgcctgtagtggatcaaagaaaattagatctgacaatattaaaaagttgacagaaccttgtgtcattggaagaccgtgtttctccaataaaattaataatagaaaccatgcgacaatcattatcgatactaattacaaacctgtttttgataggatagataacgcattaatgagaagaattgccgtcgtgcgattcagaacacacttttctcaaccttctggtagagaggctgctgaaaataatgacgcgtacgataaagtcaaactattagacgaggggttagatggtaaaatacaaaataatagatatagattcgcatttctatacttgttggtgaaatggtacagaaaatatcatgttcctattatgaaactatatcctacacccgaagagattcctgactttgcattctatctcaaaataggtactctgttagtatctagctctgtaaagcatattccattaatgacggacctctccaaaaagggatatatattgtacgataatgtggttactcttccgttgactactttccaacagaaaatatccaagtattttaattctagactatttggacacgatatagagagcttcatcaatagacataagaaatttgccaatgttagtgatgaatatctgcaatatatattcatagaggatatttcatctccgtaaatatatgctcatatatttatagaagatatcacatatctaaatgaataccggaatcatagatttatttgataatcatgttgatagtataccaactatattacctcatcagttagctactctagattatctagttagaactatcatagatgagaacagaagcgtgttattgttccatattatgggatcaggtaaaacaataatcgctttgttgttcgccttggtagcttccagatttaaaaaggtttacattctagtgccgaacatcaacatcttaaaaattttcaattataatatgggtgtagctatgaacttgtttaatgacgaattcatagctgagaatatctttattcattccacaacaagtttttattctcttaattataacgataacgtcattaattataacggattatctcgctacaataactctatttttatcgttgatgaggcacataatatctttgggaataatactggagaacttatgaccgtgataaaaaataaaaacaagattccttttttactattgtctggatctcccattactaacacacctaatactctgggtcatattatagatttaatgtccgaagagacgatagattttggtgaaattattagtcgtggtaagaaagtaattcagacacttcttaacgaacgaggtgtgaatgtacttaaggatttgcttaaaggaagaatatcatattacgaaatgcctgataaagatctaccaacgataagatatcacggacgtaagtttctagatactagagtagtatattgtcacatgtctaaacttcaagagagagattatatgattactagacgacagctatgttatcatgaaatgtttgataaaaatatgtataacgtgtcaatggcagtattgggacaacttaatctgatgaataatttagatactttatttcaggaacaggataaggaattgtacccaaatctgaaaataaataatggcgtgttatacggagaagaattggtaacgttaaacattagttccaaatttaaatactttattaatcggatacagacactcaacggaaaacattttatatacttttctaattctacatatggcggattggtaattaaatatatcatgctcagtaatggatattctgaatataatggttctcagggaactaatccacatatgataaacggcaaaccaaaaacatttgctatcgttactagtaaaatgaaatcgtctttagaggatctattagatgtgtataattctcctgaaaacgatgatggtagtcaattgatgtttttgttttcatcaaacattatgtccgaatcctatactctgaaagaggtaaggcatatttggtttatgactatcccagatactttttctcaatacaaccaaattcttggacgatctattagaaaattctcttacgccgatatttctgaaccagttaatgtatatcttttagccgccgtatattccgatttcaatgacgaagtgacgtcattaaacgattacacacaggatgaattaattaatgttttaccatttgacatcaaaaagctgttatatctaaaatttaagacgaaagaaacgaatagaatatactctattcttcaagagatgtctgaaacgtattctcttccaccacatccatcaattgtaaaagttttattgggagaattggtcagacaatttttttataataattctcgtattaagtataacgataccaagttacttaaaatggttacatcagttataaaaaataaagaagacgctaggaattacatagatgatattgtaaacggtcacttctttgtatcgaataaagtatttgataaatctcttttatacaaatacgaaaacgatattattacagtaccgtttagactttcctacgaaccatttgtttggggagttaactttcgtaaagaatataacgtggtatcttctccataaaactgatgagatatataaagaaataaatgtcgagctttgttaccaatggatacctttccgttacattggaaccacacgagctgacgttagacataaaaactaatattaggaatgccgtatataagacgtatctccatagagaaattagtggtaaaatggccaagaaaatagaaattcgtgaagacgtggaattacctctcggcgaaatagttaataattctgtagttataaacgttccgtgtgtaataacctacgcgtattatcacgttggggatatagtcagaggaacattaaacatcgaagatgaatcaaatgtaactattcaatgtggagatttaatctgtaaactaagtagagattcgggtactgtatcatttagcgattcaaagtactgcttttttcgaaatggtaatgcgtatgacaatggcagcgaagtcactgccgttctaatggaggctcaacaaggtatcgaatctagttttgtttttctcgcgaatatcgtcgactcataaaaaagagaatagcggtaagtataaacacgaatactatggcaataattgcgaatgttttattctcttcgatatatttttgataatatgaaaaacatgtctctctcaaatcggacaaccatctcataaaatagttctcgcgcgctggagaggtagttgccgctcgtataatctctccagaataatatacttgcgtgtcgtcgttcaatttatacggatttctatagttctctgttatataatgcggtttgccctcatgattagacgacgacaatagtgttctaaatttagatagttgatcagaatgaatgtttattggcgttggaaaaattatccatacagcgtctgcagagtggttgatagttgttcctagatatgtaaaataatccaacttactaggcagcaaattgtctagataaaatactgaatcaaacggtgcagacgtattggcggatctaatggaatccaattgattaactatcttttgaaaatatacatttttatgatccaatacttgtaagaatatagaaataatgataagtccatcatcgtgtttttttgcctcttcataagaactatattttttcttattccaatgaacaagattaatctctccagagtatttgtacacatctatcaagtgattggatccataatcgtcttcctttccccaatatatatgtagtgatgataacacatattcattggggagaaaccctccacttatatatcctcctttaaaattaatccttactagttttccagtgttctggatagtggttggtttcgactcattataatgtatgtctaacggcttcaatcgcgcgttagaaattgcttttttagtttctatattaataggagatagttgttgcggcatagtaaaaatgaaatgataactgtttaaaaatagctcttagtatgggaattacaatggatgaggaagtgatatttgaaactcctagagaattaatatctattaaacgaataaaagatattccaagatcaaaagacacgcatgtgtttgctgcgtgtataacaagtgacggatatccgttaataggagctagaagaacttcattcgcgttccaggcgatattatctcaacaaaattcagattctatctttagagtatccactaaactattacggtttatgtactacaatgaactaagagaaatctttagacggttgagaaaaggttctatcaacaatatcgatcctcactttgaagagttaatattattgggtggtaaactagataaaaaggaatctattaaagattgtttaagaagagaattaaaagaggaaagtgatgaacgtataacagtaaaagaatttggaaatgtaattctaaaacttacaacacgggataaattatttaataaagtatatataagttattgcatggcgtgttttattaatcaatcgttggaggatttatcgcatactagtatttacaatgtagaaattagaaagattaaatcattaaatgattgtattaacgacgataaatacgaatatctgtcttatatttataatatgctagttaatagtaaatgaacttttacagatctagtataattagtcagattattaagtataatagacgactagctaagtctattatttgcgaggatgactctcaaattattacactcacggcattcgttaaccaatgcctatggtgtcataaacgagtatccgtgtccgctattttattaactactgataacaaaatattagtatgtaacagacgagatagttttctctattctgaaataattagaactagaaacatgtttagaaaaaaacgattatttctgaattattccaattatttgaacaaacaggaaagaagtatactatcgtcatttttttctctagatccagctactactgataatgatagaatagacgctatttatccgggtggcatacccaaaaggggtgagaatgttccagagtgtttatccagggaaattaaagaagaagttaatatagacaattcttttgtattcatagacactcggttttttattcatggcatcatagaagataccattattaataaattttttgaggtaatcttctttgtcggaagaatatctctaacgagtgatcaaatcattgatacatttaaaagtaatcatgaaatcaaggatctaatatttttagatccgaattcaggtaatggactccaatacgaaattgcaaaatatgctctagatactgcaaaacttaaatgttacggccatagaggatgttattatgaatcattaaaaaaattaactgaggatgattgattaaaaaatataaattaatttaccatcgtgtatttttataacgggattgtccggcatatcatgtagatagttaccgtctacatcgtatactcgaccatctacgcctttaaatcctctatttattgacattaatctattagaattggaataccaaatattagtaccctcaattagtttattggtaatattttttttagacgatagatcgatggctcttgaaaccaaggttttccaaccggactcattgtcgatcggtgagaagtctttttcattagcatgaatccattctaatgatgtatgtttaaacactctaaacaattggacaaattcttttgatttgctttgaatgatttcaaataggtcttcgtctacagtaggcataccattagataatctagccattataaagtgcacgtttacatatctacgttctggaggagtaagaacgtgactattgagacgaatggctcttcctactatctgacgaagagacgcctcgttccatgtcatatctaaaatgaagatatcattaattgagaaaaaactaataccctcgcctccactagaagagaatacgcatgttttaatgcattctccgttagtgtttgattcttggttaaactcagccaccgccttgattctagtatcttttgttctagatgagaactctatattagagataccaaagactttgaaatatagtaataagatttctattcctgactgattaacaaatggttcaaagactagacatttaccatgggatgctaatattcccaaacatacatctataaatttgacgcttttctcttttaattcagtaaatagagagatatcagccgcactagcatcccctttcaatagttctccctttttaaaggtatctaatgcggatttagaaaactctctatctcttaatgaatttttaaaatcattatatagtgttgctatctcttgcgcgtattcgcccggatcacgattttgtctttcaggaaagctatcgaacgtaaacgtagtagccatacgtctcagaattctaaatgatgatatacctgtttttatttcagcgagtttagccttttgataaatttcttcttgctttttcgacatattaacgtatcgcattaatactgttttcttagcgaatgatgcagacccttctacgtcatcaaaaatagaaaactcgttattaactatatacgaacatagtcctcctagtttggagactaattctttttcatcgactagacgtttattctcaaatagtgattggtgttgtaaggatcctggtcgtagtaagttaaccaacatggtgaattcttgcacactattgacgataggtgtagccgataaacaaatcatcttatggttttttaacgcaatggtcttagataaaaaattatatactgaacgagtaggacggatcttaccatcttctttgattaatgatttagaaatgaagttatgacattcatcaatgatgacgcatattctactcttggaattaatagttttgatattagtaaaaaatttatttctaaaattttgatcatcgtaattaataaaaatacaatccttcgttatctctggagcgtatctgagtatagtgttcatccaaggatcttctatcaaagcctttttcaccaataagataatagcccaattcgtataaatatccttaagatgtttgagaatatatacagtagtcattgttttaccgacacccgtttcatggaacaataaaagagaatgcatactgtctaatcctaagaaaactcttgctacaaaatgttgataatccttgaggcgtactacgtccgaccccatcatttcaacaggcatattagtagttctgcgcaatgcataatcgatataggccgcgtgtgatttactcatttatgagtgataagtaataactatgttttaaaaatcacagcagtagtttaactagtcttctctgatgtttgttttcgatactttttgaatcagaagtcatactagaataaagcaacgagtgaacgtaatagagagcttcgtatactctattcgaaaactctaagaacttattaatgaattccgtatccactggattgtttaaaatactaaattgaacactgttcacatccttccaagaagaagacttagtgacggacttaacatgagacataaataaatccaaattttttttacaaacatcactagccaccataatggcgctatctttcaaccagctatcgcttacgcattttagcagtctaacatttttaaagagactacaatatattctcatagtatcgattacacctctaccgaataaagttggaagtttaataatacaatatttttcgtttacaaaatcaaataatggtcgaaacacgtcgaaggttaacatcttataatcgctaatgtatagattgttttcagtgagatgattattagatttaatagcatctcgttcacgtttgaacagtttattgcgtgcgctgaggtcggcaactacggcgtccgctttagtactcctcccataatactttacgctattaatctttaaaatttcatagactttatctagatcgctttctggtaacatgatatcatgtgtaaaaagttttaacatgtcggtcggcattctatttagatcattaactctagaaatctgaagaaagtaattagctccgtattccagactaggtaatgggcttttacctagagacagattaagttctggcaatgtttcataaaatggaagaaggacatgcgttccctcccggatattttttacaatttcatccatttacaactctatagtttgttttcattattattagttattatctcccataatcttggtaatacttaccccttgatcgtaagataccttatacaggtcattacatacaactaccaattgtttttgtacataatagattggatggttgacatccatggtggaataaactactcgaacagatagtttatctttccccctagatacattagccgtaatagttgtcggcctaaagaatatctttggtgtaaagttaaaagttagggttcttgttccattattgctttttgtcagtagttcattataaattctcgagatgggtccgttctctgaatatagaacatcatttccaaatctaacttctagtctagaaataatatcggtcttattcttaaaatctattcccttgatgaagggatcgttaatgaacaaatccttggcctttgattcggctgatctattatctccgttatagacgttacgttgactagtccaaagacttacaggaatagatgtatcgatgatgttgatactatgtgatatgtgagcaaagattgttctcttagtggcatcactatatgttccagtaatggcggaaaactttttagaaatgttatatataaaagaattttttcgtgttccaaacattagcagattagtatgaagataaacactcatattatcaggaacattatcaatttttacatacacatcagcatcttgaatagaaacgataccatcttctggaacctctacgatctcagcagactccggataaccagtcggtggaccatcgctaacaataactagatcatccaacaatctactcacatatgcatctatataatctttttcatcttgtgagtaccctggatacgaaataaatttattatccgtatttccataataaggtttagtataaacagagagagatgttgccgcatgaacttcagttacagtcgccgttggttggtttatttgacctattactctcctaggtttctctataaacgatggtttaatttgtacattcttaaccatatatccaataaagctcaattcaggaacataaacaaattctttgttgaacgtttcaaagtcgaacgaagagtcacgaataacgatatcggatactggattgaaggttaccgttacggtaatttttgaatcggatagtttaagactgctgaatgtatcttccacatcaaacggagttttaatataaacgtatactgtagatggttctttaatagtgtcattaggagttaggccaatagaaatatcattaagttcactagaatatccagagtgtttcaaagcaattgtattattgatacaattattatataattcttcgccctcaatttcccaaataacaccgttacacgaagagatagatacgtgattaatacatttatatccaacatatggtacgtaactgaatcttcccatacctttaacttctggaagttccaaactcagaaccaaatgattaagcgcagtaatatactgatccctaatttcgaagctagcgatagcctgattgtctggaccatcgtttgtcataactccggatagagaaatatattgcggcatatataaagttggaatttgactatcgactgcgaagacattagaccgtttaatagagtcatccccaccgatcaaagaattaatgatagtattattcattttctatttaaaatggaaaaagcttacaataaactccgtagagaaatatctataatttgtgagttttccttaaagtaacagcttccgtaaacgccgtctttatctcttagtaagtttattgtatttatgaccttttccttatcttcatagaatactaaaggcaacaaagaaatttttggttcttctctaagagctacgtgagacttaaccatagaagccaacgaatccctacatattttagaacagaaataccctacttcaccacccttgtatgtctcaatactaataggtctaaaaaccaaatcttgattacaaaaccaacacttatcaattacactatttgtcttaatagacacatctgccatagatttataatactttggtagtatacaagcgagtgcttcttctttagcgggcttaaagactgctttaggtgctgaaataaccacatctggaaggcttactcgcttagccatttaattacggaactatttttttatacttctaatgagcaagtagaaaacctctcatctacaaaaacgtactcgtgtccataatcctctaccatagttacacgttttttagatctcatatgtgctaaaaagttttcccatactaattggttactattatttttcgtataatttttaacagtttgaggttttagatttttagttacagaagtgatatcgaatattttatccaaaaagaatgaataattaattgtcttagaaggagtgttttcttggcaaaagaataccaagtgcttaaatatttctactacttcattaatcttttctgtactcagattcagtttctcatcttttacttgattgattatttcaaagactaacttataatcctttttatttattctctcgttagccttaagaaaactagatacaaaatttgcatctacatcatccgtggatatttgatttttttccatgatatccaagagttccgagataatttctccagaacattgatgagacaataatctccgcaatacatttctcaaatgaataagtttattagacacgtggaagtttgactttttttgtacctttgtacatttttgaaataccgactcgcaaaaaatacaatattcatatccttgttcagatactataccgttatgtctacaaccgctacataatcgtagattcatgttaacactctacgtatctcgtcgtccaatattttatataaaaacattttatttctagacgttgccagaaaatcctgtaatatttttagttttttgggctgtgaataaagtatcgccctaatattgttaccgtcttccgccaatatagtagttaaattatccgcacatgcagaagaacaccgcttaggcggattcagtacaatgttatatttttcgtaccaactcatttaaatatcataatctaaaatagttctgtaatatgtctagcgctaatatattgatcataatcctgtgcataaattaagatacaacaatgtctcgaaatcatcgacatggcttcttccatagttagaagatcgtcgtcaaagttagcaacgtgattcatcaacatttgctgttttgaggcagcaaatactgaaccgtcgccattcaaccattcataaaaaccatcgtctgaatccattgataatttcttgtactggtttttgagagctcgcatcaatctagcatttctagctcccggattgaaaacagaaagaggatcgtacatccagggtccattttctgtaaatagaatcgtataatgtcccttcaagaaaatatcagacgatccacaatcaaagaattggtctccgagtttgtaacagacagcggactttaacctatacatgataccgtttagcataatttctggtgatacgtcaatcggagtatcatctattagagatctaaagccggtgtaacattctccaccaaacatattcttattctgacgtcgttctacataaaacatcattgctccattaacgataacaggggaatgaacagcactacccatcacattagttcccaatggatcaatgtgtgtaactccagaacatcttccatagcctatgttaggaggagcgaacaccactcttccactattgccatcgaatgccatagaataaatatccttggaattgatagaaatcggactgtcggatgttgtgatcatcttcataggattaacaactatgtatggtgccgcctgaagtttcatatcgtaactgatgccgtttataggtctagccacagaaaccaacgtaggtctaaatccaactatagacaaaatagaagccaatatctgttcctcatctgtcataacttgagagcatccagtatgaataatcttcattagatggggatctaccgcatcatcatcgttacaataaaaaattcccattctaatgttcataattgcttttctaatcatggtatgcatgtttgctctctgaatctctgtggaaattagatctgatacacctgtaatcactatcggattatcctccgtaagacgattaaccaacaacatataattataagactttacttttctaaattcataaagttgctggattaggctataggtgtctccatgtacatacgcgttctcgagcgcaggaagtttaataccgaatagtgccatcagaataggatgaatatagtaattagtttctggttttctataaataaaagacaaatcttgtgaactagacatatcggtaaaatgcatggattggaatcgtgtagtcgacagaagaatatgatgattagatggagagtatattttatctaactctttgagttggtcaccgattctaggactagctcgagaatgaataagtactaaaggatgagtacatttcacagaaacactagcattgttcaatgtgctctttacatgggtaaggagttgaaatagctcgtttctatttgttctgacaatatttagtttattcataatgttaagcatatcctgaatagtaaagttagatgtgtcatacttgttagtagttagatatttagcaattgcattcccatcatttctcaatctcgtactccaatcatgtgtagatgctacttcatctatagaaaccatacaatcctttttgataggctgttgagattgattatttcctgcacgtttaggtttggtacgttgatttctagcccctgcggatataaagtcatcgtctacaatttgggacaatgaattgcatacactacaagacaaagatttatcagaagtgtgaatatgatcttcatctaccaaagaaagagtttgattagtataactagattttagtcctgcgttagatgttaaaaaaacatcgctattgaccacggcttccattatttatattcgtagtttttactcgaaagcgtgattttaatatccaatcttattacttttggaatcgttcaaaacctttgactagttgtagaatttgatctattgccctacgcgtatactcccttgcatcatatacgttcgtcaccagatcgtttgtttcggcctgaagttggtgcatatctctttcaacattcgacatgagatccttaagggccatatcgtctagattttgttgagatgttgctcctggatttggattttgttgtgctgttgtacatactgtaccaccagtaggtgtaggagtacatacagtggccacaataggaggttgaggaggtgtaaccgttggagtagtacaagaaatacttccatccgattgttgtgtacatgtagttgttggtaacgtctgagaaggttgggtagatggcggtgtcgtcgtcttttgatctttattaaatttagagataatatcctgaacagcattgctcggcgtcaacgctggaaggagtgaactcgccggcgcatcagtatcttcagacagccaatcaaaaagattagacatatcagatgatgtattagtttgttgtcgtggttttggtgtaggagcagtactactaggtagaagaataggagccgatgtagctgttggaaccggctgtggagttatatgaatagttggttgtagcggttggataggctgtctgctggcggccatcatattatctctagctagttgttctcgcaactgtctttgataatacgactcttgagactttagtcctatttcaatcgcttcatcctttttcgtatccggatccttttcttcagaataatagattgacgactttggtgtagaggattctgccagcctctgtgagaacttgttaaagaagtccatttaaggctttaaaattgaattgcgattataagattaaatggcagacacagacgatattatcgactatgaatccgatgatctcaccgaatacgaggatgatgaagaagaggaagaagatggagagtcactagaaactagtgatatagatcccaaatcttcttataagattgtagaatcagcatccactcatatagaagatgcgcattccaatcttaaacatatagggaatcatatatctgctcttaaacgacgctatactagacgtataagtctatttgaaatagcgggtataatagcagaaagctataacttgcttcaacgaggaagattacctctagtttcagaattttctgacgaaacgatgaagcaaaatatgctacatgtaattatacaagagatagaggagggttcttgtcctatagtcatcgaaaagaacggagaattgttgtcggtaaacgattttgacaaagatggtctaaaattccatctagactatattatcaaaatttggaaacttcaaaaacgatattagaatttatacgaatatcgttctctaaatgtcacaatcaagtctcgcatgttcagcaatttattgtcgtactttatatcgtgttcattaacgatatcttgcaaaatagtaatgattctatcttccttcgatagatattcttcagagattattgtcttatattctttcttgttatcagatatgaatttgataagactttgaacattattgatacccgtctgtttaattttttctacagatattttagttttggcagattctatcgtatctgtcaatagacatccaacatcgacattcgacgtcaattgtctataaatcaacgtataaattttagaaataacattagcgaattgttgtgcgttgatgtcgttattctgaaacagtatgattttaggtagcattttcttaacaaagagaacgtatttattgttactcagttgaacagatgatatatccagattactaacgcatctgattccgtataccaaactttcagaagaaatggtatacaattgtttgtattcattcaatgtctctttttcagaaattagtttagagtcgaatactgcaataattttcaagagatagttttcatcagataagattttatttagtgtagatatgataaaactattgttttgttggagaacttgatacgccgcgttctctgtagtcgacgctctcaaatgggaaacaatctccattatttttttggaatcggatactatatcttcggtatcttgacgcagtctagtatacatagagttaagagagattagagtttgtacattaagcaacatgtctctaaatgtggctacaaacttttcctttttcacatcatctagtttattatataccgatttcacaacggcaccagatttaaggaaccagaatgaaaaactctgataactacaatatttcatcatagttacgattttatcatcttctatagttggtgtaatagcgcatacctttttctccaagactggaaccaacgtcataaaaatgtttaaatcaaaatccatatcaacatctgatgcgctaagaccagtctcgcgttcaagattatctttactaatggtgacgaactcatcgtataaaactctaagtttgtccattatttatttacagatttagttgtttaatttatttgtgctcttccagagttgggatagtatttttctaacgtcggtattatattattaggatctacgttcatatgtatcataatattaatcatccacgttttgataaatctatctttagcttctgaaataacgtatttaaacaaaggagaaaaatatttagctacggcatcagacgcaataacattttttgtaaatgtaacgtatttagacgacagatcttcgttaaaaagttttccatctatgtagaatccatcggttgttaacaccattcccgcgtcagattgaataggagtttgaatagtttgttttggaaatagatccttcaataacttatagttgggtgggaaaaaatcgattttatcactagactctttcttttttactatcattacctcatgaactatttcttgaatgagtatatgtattttctttcctatatcggacgcgttcattggaaaatataccatgtcgttaactataagaatatttttatcctcgtttacaaactgaataatatcagatgtagttcgtaaacgaactatatcatcaccagcacaacatctaactatatgatatccactagtttcctttagccgtttattatcttgttccatattagcagtcattccatcatttaagaaggcgtcaaagataatagggagaaatgacattttggattctgttacgactttaccaaaattaaggatatacggacttactatctttttctcaacgtcaatttgatgaacacacgatgaaaatgtgcttctatgagattgatcatgtagaaaacaacaagggatacaatatttccgcatatcatgaaatatattaagaaatcccaccttattatatttccccaaaggatccatgcacgtaaacattatgccgttatcattaataaagacttctttctcatcggatctgtaaaagttgttactgatttttttcattccaggatctagataattaataatgatgggttttctattcttattctttgtattttggcatatcctagaccagtaaacagtttccactttggtaaaatcagcagacttttgaacgctattaaacatggcattaatggcaataactaaaaatgtaaaatatttttctatgttaggaatatggtttttcactttaatagatatatggtttttggccaaaatgatagatatttttttatccgaggatagtaaaatattattagtcgccgtctctataaaaatgaagctagtctcgatatccaattttattctagaattgataggagtcgccaaatgtaccttatacgttatatctcccttgatgcgttccatttgtgtatctatatcggacacaagatctgtaaatagttttacgttattaatcatcacggtatcgccgtcgctagataacgctaatgtaccatccaagtcccaaatggagagatttaactgttcatcgtttagaataaaatgattaccggtcatattaataaagtgttcatcgtatctagataacaacgacttataattaatgtccaagtcttgaactcgctgaatgatcttttttaacccagttagttttagattggtacgaaatatattgttaaactttgattctacagtaatgtccaaatctagttgtggaaatacttccatcaacattgtttcaaacttgataatattattatctacatcttcgtacgatccaaattccggaatagatgtatcgcacgctctggccacccagataaccaaaaagtcacacgctccaggatatacattgtataaaaagctatcgttttttagtagggtttttttctgcgtgtatacgaagggattaaaaatagtattatcaacgtaactatattccaaattattcttatgagaatagataataatatcgtccttaatatctaacaaatttcctaaatatccctttaattgagtcattcgaagcgtcaatagaatatgtctcttaactatttccggctgttgtatatttaaatgacttcgtaaaaaataatatatgggcgacttctcatctatgtaatcatatggagtgagatatagggctcgttctacctcctgccccttacccacctgtaataccaattgcggacttactatatatcgcatatttatatcgtggggtaaagtgaaaatctactaccgatgatgtaagtcttacaatgttcgaaccagtaccagatcttaatttggaggcctccgtagaactaggggaggtaaatatagatcaaacaacacctatgataaaggagaatagcggttttatatcccgcagtagacgtctattcgcccatagatctaaggatgatgagagaaaactagcactacgattctttttacaaagactttattttttagatcatagagagattcattatttgttcagatgcgttgacgctgtaaaagacgtcactattaccaaaaaaaataacattatcgtggcgccttatatagcacttttaactatcgcatcaaaaggatgcaaacttacagaaacaatgattgaagcattctttccagaactatataatgaacatagtaagaaatttaaattcaactctcaagtatccatcatccaagaaaaactcggataccagtttggaaactatcacgtttatgattttgaaccgtattactctacagtagctctggctattcgagatgaacattcatctggcatttttaatatccgtcaagagagttatctggtaagttcattatctgaaataacatatagattttatctaattaatctaaaatctgatcttgttcaatggagtgctagtacgggcgctgtaattaatcaaatggtaaatactgtattgattacagtgtatgaaaagttacaactggtcatagaaaatgattcacaatttacatgttcattggctgtggaatcaaaacttccaataaaattacttaaagatagaaatgaattatttacaaaattcattaacgagttaaaaaagaccagttcattcaagataagcaaacgcgataaggatacgctactaaaatattttacttaggactggagttagaatttatagacgactcatttcgtttatcattgttactattattactattactatcattattagtgttggcattattagtattcttcttgtcatcttgttcagaaatatacagcaatgctatacctaatactaaatacattatcatgctcgcaatggctctaacaacaacgaaccaaaatgaatttggtcgtagcttttgttcacaaaaatacataaagaaatgtctacataaatctatggcgccattggctacttgaaatagcgccagtcctcctacagattttaatatagctgtataacatgacatttattcatcatcaaaagagacagagtcaccatctgtcatatttagattttttttcatgtgttcaaagtatcctctactcatttcattataatagtttatcatacttagaattttaggacggatcaatgagtaagacttgactagatcgtcagtagtaatttgtgcatcgtctattctgcatccgcttcgtcgaataatgtatagcatcgctttgagattctccatagctatcaagtctttatacaatgacatggaaatatctgtgaatactttatacttctccaacatcgatgccttaacatcatcgcctactttagcattgaaaatacgttctattgtgtagatggatgtagcaagatttttaaacaacaatgccatcttacacgatgattgcctcaagtctccaatcgtttgtttagaacgattagctacagagtccaatgcttggctgactagcatattattatctttagaaattgtattcttcaatgaggcgtttatcatatctgtgatttcgttagtcatattacagtctgactgggttgtaatgttatccaacatatcacctatggatacggtacacgtaccagcatttgtaataatcctatctaagatgttgtatggcattgcgcagaaaatatcttctcctgtaatatctccactctcgataaatctactcagattattcttaaatgccttattctctggagaaaagatatcagtgtccatcatttcattaatagtatacgcagaaaagataccacgagtatcaattctatccaagatacttatcggttccgagtcacagataatggtttcctctccttcgggagatcctgcatagaaatatctaggacaatagtttctatactgtctgtaactctgataatctctaaagtcactaactgataccatgaaattgagaagatcaaacgctgaagtaattaatttttctgcctcgtttttactacaactagttttcatcaatgtagtgacgatgtattgtttagttacttttggtctaatactgatgatagagatattattgcttcccataatggatcttctagtagtcaccttaaagcccattgatgcgaatagcagatagataaagtcttggtatgactcctttctaatatagtacggactacctttgtcacccaactttatacccacataagccataacaacctctttaatagccgtttcatgaggtttatcagccatgagcctgagtagttggaagaatctcatgaatcccgtctcagaaagtcctatatgcatgatagatttatctttcctgggaaactctcgtatagtcatagatgaaatactcttcaaagtttctgaaataagattagtaacagtcttacctccgactactctaggtaacaaacaaactctaataggtgttttctctgcggagataatatcagaaaggatagagcaataagtagtattattgtgattataaagaccgaatacataacaggtagaatttataaacatcatgtcctgaaggtttttagacttgtattcctcgtaatccataccgtcccaaaacatggatttggtaactttgatagccgtagatctttgttccttcgccaacaggttaaagaaattaataaagaatttgttgtttctatttatgtccacaaattgcacgtttggaagcgccacggttacattcactgcagcattttgaggatcgcgagtatgaagtacgatgttattgtttactggtatatctggaaagaaatctaccagtctaggaataagagattgatatcgcatagaaatagtaaagtttataatctcatcatcgaagagcattttgttaccattgtaataaatatccactctgtcatatgtataaatgaagtactgttcaaacatgatgagatgtttatatgttggcatagtagtgagatcgacgtttggtaatggcaatgtattaagattaactccataatgtctagcagcatctgcgatgttataagcgtcgtcaaagcggggtcgatcttgtattgttatatattgtctaacacctataagattatcaaaatcttgtctgcttaatacaccgttaacaatttttgccttgaattcttttattggtgcattaataacatccttatagaggatgttaaacaaataagtgttatcaaagttaagatctggatatttcttttctgctagaacatccattgagtcggagccatctggtttaatataaccaccgataaatctagctctgtattctgtatccgtcaatctaatattaagaaggtgttgagtgaaaggtggaagatcgtaaaagctgtgagtattaatgataggattagtttccgaactaatgttaattggggtattaataatatctatatttccagcgttaagtgtaacattaaacagttttaattcacgtgacgtggtatcaattaaataattaatgcccaatttggatatagcagcctgaagctcatcttgtttagttacggatcctaatgagttattaagcaatatatcgaacggatgaacgaaggttgttttaagttggtcacatactttgtaatctagacatagatgcggaagaacggtagaaactatacgaaataaatattcagagtcctctaattgatcaagagtaactattgacttaataggcatcatttatttagtattaaatgacgaccgtaccagtgacggatatacaaaacgatttaattacagagttttcagaagataattatccatctaacaaaaattatgaaataactcttcgtcaaatgtctattctaactcacgttaacaacgtggtagatagagaacataatgccgccgtagtgtcatctccagaggaaatatcctcacaacttaatgaagatctatttccagatgatgattcaccggccactattatcgaacgagtacaacctcatactactattattgacgatactccacctcctacgtttcgtagagagttattaatatcggaacaacgtcaacaacgagaaaaaagatttaatattacagtatcgaaaaatgctgaagcaataatggaatctagatctatgataacttctatgccaacacaaacaccatccttgggagtagtttatgataaagataaaagaattcagatgttagaggatgaagtggttaatcttagaaatcaacgatctaatacaaaatcatctgataatttagataattttaccaaaatactatttggtaagactccgtacaaatcaacagaagttaataagcgtatagccatcgttaattatgcaaatttgaacgggtcccccttatcagtcgaggacttggatgtttgttcggaggatgaaatagatagaatctataaaacgattaaacaatatcacgaaagtagaaaacgaaaaattatcgtcactaacgtgattattattgtcataaacattatcgagcaggcattgctaaaactcggatttgaagaaatcaaaggactgagtaccgatatcacttcagaaattatcgatgtggagatcggagatgactgcgatgctgtagcatctaaactaggaatcggtaacagtccggttcttaatattgtattgtttatactcaagatattcgttaaacgaattaaaattatttaatttaatacattcccatatccagacaacaatcgtctggattaatctgttcctgtcgtctcataccggacgacatattaatctttttattagtgggcatctttttagatggtttctttttcccagcattaactgagtcgatacctagaagatcgtgattgatctctccgaccattccacgaacttctaattggccgtctctgacggtaccataaactattttaccagcattagtaacagcttggacaatctgaccatccatcgcattgtacgatgtagtagtaactgttgttctacgtctaggagcaccagaagtatttttggagcccttggatgttgatgtagaagaagacgaggattttgattttggtttacatgtaatacattttgaactctttgattttgtatcacatgcgccggcagtcacatctgtttgagaattaagattattgttgcctcctttgacggctgcatctccaccgatttgcgctagtagatttttaagctgtggtgtaatcttattaactgtttcgatataatcatcgtaactgcttctaacggctaaattttttttatccgccatttagaagctaaaaatatttttatttatgcagaagatttaactagattatacaatgaactaatatgatccttttccagattatttacaaacttggtattttttggttctggaggaggcgaatttaaattcggacttggattcggattttgtaagttcttgatcttattatacatcgagtataggatggcgacagtaactgctacacaaataccgatcaaaagaagaataccaatcatttattgacaataacttcactattgatcaagtatgcaatatatcatcttttcactaaataagtagtaataatgattcaacaatgtcgagatatatggacgataataatttagttcatggaaatatcgctatgattggtgtgaatgactccgctaactctgtggggtgcgcagtgctttccccacatagaataaattagcattccgactgtgataataataccaagtataaacgccataatactcaatactttccatgtacgagtgggactggtagacttactaaagtcaataaaggcgaagatacacgaaagaatcaaaagaatgattccagcgattagcacgccggaaaaataatttccaatcataagcatcatgtccatttaactaataaaaattttaaatcgccgaatgaacaaagtggaatataaaccatataaaaacaatagtttgtactgcaaaaataatatctatttttgttttcgaagatatggtaaaattaaatagtagtacacagcatgttataactaacagcagcaacggctcgtaattacttatcatttactagacgaaaaggtggtgggatattttcttgctcaaataatacgaatatatcacccatccattttatgcgatgtttatatactctaatctttaatagatctatagacgacgggtttaccaacaatatagattttatcgattcatctaatttaaacccttccttaaacgtgaatgatctattatctggcataacgatgaccctacctgatgaatcggacaatgtactgggccatgtagaataaattatcaacgaattatcgtctacgaacatttatatcatttgttttaattttaggacgcgaataaatggatataaaatagaaaataacagatattacaaccagtgttatggccgcgcccaaccaggtaggcagttttattttatcttttactacaggttctcctggatgtacgtcaccaacggcggacgtagttctagtacaattagacgtaagttccgcttgggaattttttaacgctaaagagttaacgttaatcgtgcacccaacgtatttacatctagttcgttgaacatcttgattataatataaccattttctatctctagattcgtcagtgcactcatgtaaccaacataccctaggtcctaaatatttatctccggaattagattttggataattcgcgcaccaacaatttctatttcctttatgatcgttacaaaagacgtataatgccgtatccccaaaagtaaaataatcaggacgaataattctaataaactcagaacaatatctcgcatccatatgtttggagcaaatatcggaataagtagacatagccggtttccgttttgcacgtaaccattctaaacaattggggtttccaggatcgtttttacaaaatccagtcatgaaatcatcacaatgttctgtcttgtaattattattaaatatttttggacagtgtttggtatttgtcttagaacaacattttgctacgctatcactatcgcccaggagataatccttttttataaaatgacatcgttgcccggatgctatataatcagtggcgtgttttaaatccttaatatattcaggagttacctcgttctgataatagattaatgatccaggacgaaatttgaaagaactacatggttctccatgaattaatacatattgtttagcaaattcaggaactataaaactactacaatgatctatcgacataccatctatcaaacaaaacttgggtttaatttctcccggagatgtttcataatagtacgtataactttcttctgcaaacttaacagctctattatattcaggataattaaaacctaattccatatatttgtctcgtatatctgctattcctggtgctattttgattctattaagagtaacagctgcccccattcttaataatcgtcagtatttaaactgttaaatgttggtatatcaacatctaccttatttcccgcagtataaggtttgttgcaggtatactgttcaggaatggttacatttatacttcttctatagtcctgtctttcgatgttcatcacatatgcaaagaacagaataaacaaaataatgtaagaaataatattaaatatctgtgaattcgtaaatacattgattgccataataattacagcagctacaatacacacaatagacattcccacagtgttgccattacctccacgatacatttgagttactaagcaataggtaataactaagctagtaagaggcaatagaaaagatgagataaatatcatcaatatagagattagaggagggctatatagagccaagacgaacaaaatcaaaccgagtaacgttctaacatcattatttttgaagattcccaaataatcattcattcctccataatcgttttgcatcatacctccatctttaggcataaacgattgctgctgttcctctgtaaataaatctttatcaagcactccagcacccgcagagaagtcgtcaagcatattgtaatatcttaaataactcatttatatattaaaaaatgtcactattaaagatggagtataatctttatgccgaactaaaaaaaatgacttgtggtcaacccctaagtctttttaacgaagacggggatttcgtagaagttgaaccgggatcatcctttaagtttctgatacctaagggattttacgcctctccttccgtaaagacgagtctagtattcgagacattaacaacgaccgataataaaatcactagtatcaatccaacaaatgcgccaaagttatatcctcttcaacgcaaagtcgtatctgaagtagtttctaatatgaggaaaatgatcgaatcaaaacgtcctctatacattactcttcacttggcgtgtggatttggtaagactattaccacgtgttatcttatggctacacacggtagaaaaaccgtcatttgcgtacccaataaaatgttaatacatcaatggaagacacaggtagaggcagtcggattggaacataagatatccatagatggagtaagtagtctattaaaggaactaaagactcaaagtccggatgtattaatagtagtcagtagacatctgacaaacgatgccttttgtaaatatatcaataagcattatgatttgttcatcttggatgaatcacatacgtataatctgatgaacaatacagcagttacaagatttttagcgtattatcctccgatgatgtgttattttttaactgctacacctagaccatctaaccgaatttattgtaacagtattattaatattgccaagttatccaatctaaaaaaaactatctatgcagtagatagtttttttgagccatattccacagataatattagacatatggtaaaacgactagatggaccatctaataaatatcatatatataccgagaagttattatctgtagacgagcctagaaatcaacttattcttgataccctggtagaagaattcaagtcaggaactattaatcgcattttagttattactaaactacgtgaacatatggtattattctacaaacgattattagattttttcggaccagaggttgtatttataggagacgcccaaaatagacgtactccagatatggtcaaatcaatcaaggaactaaatagatttatattcgtatccaccttattttattccggtactggtttagatattcctagtttggattcgttgttcatttgctcggcagtaatcaacaatatgcaaatagagcaattactagggagggtatgtcgagaaacagaactattagataggacggtatatgtatttcctaacacatccatcaaagaaataaagtacatgataggaaatttcatgcaacgaattattagtctgtctgtagataaactaggatttaaacaaaaaagttatcggaaacatcaagaatccgatcccacttctgcatgtacaacatcatccagagaagaacgtgtattaaatagaatatttaactcgcaaaatcgttaagaagtttaagcgacgatccgcatgctgcgcaggccagtgtattacccctcatagtattaatataatccaatgatacttttgtgatgtcggaaatcttaaccaatttagactgacaggcagaacacgtcatgcaatcatcatcgtcatcgataactgtagtcttgggcttctttttgcgactcttcattccggaacgcacattggtgctatccatttaggtagtaaaaaataagtcagaatatgccctataacacgatcgtgcaaaacctggtatatcgtctctatctttatcacaatatagtgtatcgacatttttattattattgacctcgtttatcttggaacatggaatgggaacatttttgttatcaacggccatctttgccttaattccagatgttgtaaaattataactaaacagtctatcatcgacacaaatgaaattcttgtttagacgtttgtagtttacgtatgcggctcgttcgcgtctcattttttcagatattgcaggtactataatattaaaaataagaatgaaataacataggattaaaaataaagttatcatgacttctagcgctgatttaactaacttaaaagaattacttagtctgtacaaaagtttgagattttcagattctgcggctatagaaaagtataattctttggtagaatggggaacatctacttactggaaaataggcgtgcaaaaggtagctaatgtcgagacgtcaatatctgattattatgatgaggtaaaaaataaaccgtttaatattgatccgggctattacattttcttaccggtatattttgggagcgtctttatttattcgaagggtaaaaatatggtagaacttggatctggaaactcttttcaaataccagatgatatgcgaagtgcgtgtaacaaagtattagacagcgataacggaatagactttctgagatttgttttgttaaacaatagatggataatggaagatgctatatcaaaatatcagtctccagttaatatatttaaactagctagtgagtacggattaaacatacccaaatatttagaaattgaaatagaggaagacacattatttgacgacgagttatactctattatagaacgctctttcgatgataaatttccaaaaatatccatatcgtatattaagttgggagaacttagacggcaagttgtagactttttcaaattctcattcatgtatattgagtccatcaaggtagatcgtataggagataatatttttattcctagcgttataacaaaatcaggaaaaaagatattagtaaaagatgtagaccatttaatacgatccaaggttagagaacatacatttgtaaaagtaaaaaagaaaaacacattttccattttatacgactatgatggaaacggaacagaaactagaggagaagtaataaaacgaattatagacactataggacgagactattatgttaacggaaagtatttctctaaggttggtagtgcaggcttaaagcaattgactaataaattagatattaatgagtgcgcaactgtcgatgagttagttgatgagattaataaatccggaactgtaaaacgaaaaataaaaaaccaatcagcatttgatttaagcagagaatgtttgggatatccagaagcggattttataacgttagttaataacatgcggttcaaaatagaaaattgtaaggttgtaaatttcaatattgaaaatactaattgtttaaataacccgagtattgaaactatatatggaaactttaaccagttcgtctcaatctttaatgtcgtcaccgatgtcaaaaaaagattattcgagtgaaataatatgcgcctttgatataggtgcaaaaaatcctgccagaactgttttagaagtcaaggataactccgttagggtattggatatatcaaaattagactggagttctgattgggaaaggcgcatagctaaagatttgtcacaatatgaatacactacagttcttctagaacgtcagcctagaaggtcgccgtatgttaaatttatctattttattaaaggctttttatatcatacatcggctgccaaagttatttgcgtctcgcctgtcatgtctggtaattcatatagagatcgaaaaaagagatcggtcgaagcatttcttgattggatggacacattcggattgcgagactccgttccggatagacgcaaattagacgatgtagcggatagtttcaatttggctatgagatacgtattagataaatggaatactaattatacaccttataataggtgtaaatctagaaattacataaaaaaaatgtaataacgttagtaacgccattatggataatctatttacctttctacatgaaatagaagatagatatgccagaactatttttaactttcatctaataagttgcgatgaaataggagatatatatggtcttatgaaagaacgcatttcctcagaggatatgtttgataatatagtgtataataaagatatacatcctgccattaagaaactagtgtattgcgacatccaacttactaaacacattattaatcagaatacgtatccggtatttaacgattcttcacaagtgaaatgttgtcattatttcgacataaactcagataatagcaatattagctctcgtacagtagagatatttgagagggaaaagtcatctcttgtatcatatattaaaactaccaataagaagagaaaggtcaattacggcgaaataaagaaaactgttcatggaggcactaatgcaaattacttttccggtaaaaagtctgacgagtatctgagtactacagttagatccaacattaatcaaccttggatcaaaaccatttctaagagaatgagagtagatatcattaatcactctatagtaacgcgtggaaaaagctctatattacaaactatagaaattatttttactaatagaacatgtgtgaaaatattcaaggattctactatgcacattattctatccaaggacaaggatgaaaaggggtgtatacacatgattgacaaattattctatgtctattataatttatttctgttgttcgaagatatcatccaaaacgagtactttaaagaagtagctaatgttgtaaaccacgtactcacggctacggcattagatgagaaattattcctaattaagaaaatggctgaacacgatgtttatggagttagcaatttcaaaatagggatgtttaacctgacatttattaagtcgttggatcataccgttttcccctctctgttagatgaggatagcaaaataaagttttttaaggggaaaaagctcaatattgtagcattacgatctctggaggattgtataaattacgtgactaaatccgagaatatgatagaaatgatgaaggaaagatcgactattttaaatagcatagatatagaaacggaatcggtagatcgtctaaaagaattgcttctaaaatgaaaaaaaacactgattcagaaatggatcaacgactcggatataagtttttggtgcctgatcctaaagccggagttttttatagaccgttacatttccaatatgtatcgtattctaattttatattgcatcgattgcatgaaatcttgaccgtcaagcggccactcttatcgtttaagaataatacagaacgaattatgatagaaattagcaatgttaaagtgactcctccagattactcacctataatcgcgagtattaaaggtaagagttatgacgcattagccacgttcactgtaaatatctttaaagaggtaatgaccaaagagggtatatccatcactaaaataagtagttatgagggaaaagattctcatttgataaaaattccgctactaataggatacgggaataaaaatccacttgatacagccaagtatcttgttcctaatgtcataggtggagtctttatcaataaacaatctgtcgaaaaagtaggaattaatctagtagaaaagattacaacatggccaaaatttagggttgttaagccaaactcattcactttctcgttttcctccgtatcccctcctaatgtattaccgacaagatatcgccattacaagatatctctggatatatcacaattggaagcgttgaatatatcatcgacaaagacatttataacggtcaatattgttttgctgtctcaatatttatctagagtgagtctagaattcattagacgtagtttatcatacgatatgcctccagaagttgtctatctagtaaacgcgataatagatagtgctaaacgaattactgaatctattactgactttaatattgatacatacattaatgacctggtggaagctgaacacattaaacaaaaatctcagttaacgattaacgagttcaaatatgaaatgctgcataactttttacctcatatgaactatacacccgatcaactaaagggattttatatgatatctttactaagaaagtttctctactgtatcttccacacttctagatatccagatagagattcgatggtttgtcatcgcatcctaacgtacggcaaatattttgagacgttggcacatgatgaattagagaattacataggcaacatccgaaacgatatcatgaacaatcacaagaacagaggcacttacgcggtaaacattcatgtactaacaactcccggacttaatcacgcgttttctagcttattgagtggaaagttcaaaaagtcagacggtagttatcgaacacatcctcactattcatggatgcagaatatttctattcctaggagtgttggattttatccggatcaagtaaagatttcaaagatgttttctgtcagaaaataccatccaagtcaatatctttacttttgttcatcagacgttccggaaagaggtcctcaggtaggtttagtatctcaattgtctgtcttgagttccattacaaatatactaacgtctgagtatttggatttggaaaagaaaatttgtgagtatatcagatcatattataaagatgatataagttactttgaaacaggatttccaatcactatagaaaatgctctagtcgcatctcttaatccaaatatgatatgtgattttgtaactgactttagacgtagaaaacggatgggattcttcggtaacttggaggtaggtattactttagttagggatcacatgaatgaaattcgcattaatattggagcgggaagattagtcagaccattcttggttgtggataacggagagctcatgatggatgtgtgtccggagttagaaagcagattagacgacatgacattctctgacattcagaaagagtttccgcatgtcatcgaaatggtagatatagaacaatttacttttagtaacgtatgtgaatcggttcaaaaatttagaatgatgtcaaaggatgaaagaaagcaatacgatttatgtgactttcctgccgaatttagagatggatatgtagcatcttcactagtgggaatcaatcacaattctggacccagagctattcttggatgtgctcaagctaaacaagctatctcttgtctgagttcggatatacgaaataaaatagacaatggaattcatttgatgtatccagagaggccaattgtcattagtaaggctttagaaacttcaaagattgcggctaattgcttcggacaacatgttactatagcattaatgtcgtacaaaggtatcaatcaagaggatggaattatcatcaaaaaacaatttattcagagaggcggtctcgatatagttaccgcaaagaaacatcaagtagaaattccgttggaaaactttaataacaaagaaagagataggtctaacgcctattcaaaattagaaagtaatggattagttagactgaatgctttcttggaatccggagacgctatggcacgaaatatctcatcaagaactcttgaagatgattttgctagagataatcagattagcttcgatgtttccgagaaatataccgatatgtacaaatctcgcgttgaacgagtacaagtagaacttactgacaaagttaaggtacgagtattaaccatgaaagaaagaagacccattctaggagacaaatttaccactagaacgagtcaaaagggaacagtcgcgtatgtcgcggatgaaacggaacttccatacgacgaaaatggtatcacaccagatgtcattattaattctacatccatcttctctagaaaaactatatctatgttgatagaggttattttaacagccgcatattctgctaagccgtacaacaataagggagaaaaccgacctgtctgttttcctagtagtaacgaaacatccatcgatacatatatgcaattcgctaaacaatgttatgagcattcaaatccgaaattgtctgatgaagaattatcggataaaatcttttgtgaaaagattctctatgatcctgaaacggataagccttatgcatccaaagtattttttggaccaatttattacttgcgtctgagacatttaactcaggacaaggcaaccgttagatgtagaggtaaaaagacgaagctcattagacaggcgaatgagggacgaaaacgtggaggaggtatcaagttcggagaaatggagagagactgtttaatagcgcatggtgcagccaatactattacagaagttttgaaagattcggaagaagattatcaagatgtgtatgtttgtgaaaattgtggagacatagcagcacaaatcaagggtattaatacatgtcttagatgttcaaaacttaatctctctcctctcttaacaaaaattgataccacgcacgtatctaaagtatttcttactcaaatgaacgccagaggcgtaaaagtcaaattagatttcgaacgaagacctccttcgttttataaaccattagataaagttgatctcaagccgtcttttctggtgtaatattctagtttggtagtagatacatatcaatatcatcaaattcgagatccgaattataaaatgggcgtggattgttaactatagaatcggacgtctgatattcgaaaatctgtggagtttcaggttttggtggaggtgtaactgctacttgggatactgaagtctgatattcagaaagctgggggatgttctggttcgacatccaccgatggtgttacaccactactaatcggttcggtaacgtctgtggacgatggaggcaccacttctacagaacctgtagcctcagttgtcaacggagatacatttttaatgcgagaaaatgtataatttggtaatggtttctcatgtggatctgaagaagaggtaagatatctactagaaagataccgatcacgttctagttctcttttgtagaacttaactttttctttctcagcatctagttgatattccaacctcttcacgttactacgttcagattccaattcacgttcgcatgggttacctccgcagtttttacgagcgatttcacgttcagccttcatgcgtctctccctctctttatcgagtttatcagagcagtctttctgaaggcgatcgaactccataaatttctccaacgctttgattgtttccatagatttccgaagttcagcttttaggactgtgattctttttctttcgaattcacagctggatgtacaaccgtttccattaccgccatctctaagtttcttttctagatcggcaacatttcatccccatgccttttacattcctcgagtctactgtcgtcgaaatatcgttccagctccttttcgacatcaataactttagcacgttgtctctcaagctctcttttgtagttatctgattccctggcacgtttaagatcttcatgcaattgagtcagctcttaacttcctctcttgcttcttcgtcatagtacgcgcaatcactgtgagatccattgttaccacgtctacactcggcgagctcgcgtttaagagattcaatttcccgtttgtattggtccatgtttccattgctaccaccattagatttacaggctgctagttgtcgttcgagatcagaaatacgggttttcttggaattgatttcgtcgatgtacttggcatcgaaacacttattaagttctttttccaattctacgattttatttctttcgcgagtcaattccctcctgtagtaactatctgttttgtcagattcacgctctctacgtagactttcttgcaagttactaatttgttccctagcacgtccgagtttagttttatatgctgaatagagttctgattcatcctttgagcagatctctagcgatcgtttaagattcctaattctagtctttagcctatttacctcctcagaagatgttccgttaccgttgcgtttacactcgttaagctgtctatcaagatccatgattctatctctaagacgttgcatctctctttccatatcagcattgctttcattattacgtctgcagtcactcaactgtctttcaatatctgagattctatctctaagacgtcgcatctctctctgtttcggcattggtttcattattacgtttacagtcgttcaactgtctttcaagatctgatattctagattggagtctgctaatctctgtagcattttcacggcattcactcagttgtctttcaagatctgaaattttagattggagtctgctaatctctgtaagatttcctcctccgctctcgatgcagtcggtcaacttattctctagttctctaatacgcgaacgcagtgcatcaacttcttgcgtgtcttcctggttgcgtgtacattcatcgagtctagattcgagatctctaacgcgtcgtcgttcttcctcaagttctctgcgtactacagaaagcgtgtccttatcttgttgatatttagcaatttctgattctagagtactgattttgcttacgtagttactaatatttgtcttggccttatcaagatcctccttgtatttgtcgcattccttgatatccctacgaagtctggacagttcccattcgacattacgacgtttatcgatttcagctcggagatcgtcatcgcgttgttttagccacatacgactgagttcaagttctcgttgacaagatccatctacttttccattcctaatagtatccagttccttttctagttctgaacgcatttctcgttccctatcaagcgattctctcaattctcggatagtcttcttatcaatttctaataaatctgaaccatcatctgtcccattttgaatatccctgtgttctttgatctcttttgtaagtcggtcgattctttcggttttataaacagaatccctttccaaagtcctaatcttactgagtttatcactaagttctgcattcaattcggtgagttttctcttggcttcttccaactctgttttaaactctccactatttccgcattcttcctcgcatttatctaaccattcaattagtttattaataactagttggtaatcagcgattcctatagccgttcttgtaattgtgggaacataattaggatcttctaatggattgtatggcttgatagcatcatctttatcattattagggggatggacaaccttaattggttggtcctcatctcctccagtagcgtgtggttcttcaataccagtgttagtaataggcttaggcaaatgcttgtcgtacgcgggcacttcctcatccatcaagtatttataatcgggttctacttcagaatattcttttctaagagacgcgacttcgggagttagtagaagaactctgtttctgtatctatcaacgctggaatcaatactcaagttaaggatagcgaatacctcatcgtcatcatccgtatcttctgaaacaccatcatatgacatttcatgaagtctaacgtattgataaatagaatcagatttagtattaaacagatccttaacctttttagtaaacgcatatgtatattttagatctccagatttcataatatgatcacatgccttaaatgtcagtgcttccatgatataatctggaacactaatgggtgacgaaaaagatacagcaccatatgctacgttgataaataaatctgaaccactaagtagataatgattaatgttaagaaagaggaaatattcagtgtataggtatgtcttggcgtcatatcttgtactaaacacgctaaacagtttgttaatgtgatcaatttccaatagattaattagagcagcgggaataccaacaaacatattaccacatccgtattttctatgaatatcacatatcatgttaaaaaatcttgatagaagagcgaatatctcgtctgacttaatgagtcgtagttcagcagcaacataagtcataactgtaaatagaacatactttcctgtagtgttgattctagactccacatcaacaccattattaaaaatagttttatatacatctttaatctgctctccgttaatcgtcgaacgttctagtatacggaaacactttgatttcttatctgtagttaatgacttagtgatatcacgaagaatattacgaattacatttcttgtttttcttgagagacctgattcagaactcaactcatcgttccatagtttttctacctcagtggcgaaatctttggagtgcttggtacatttttcaataaggttcgtgacctccatttattataaaaaatttattcaaaacttaactacaatcgggtaattataaaatcgtagatctcccatgtggcggaatactaccatctatcgcatgtggatggacagtaggtaatggccatgggaacagtaatgtttgcatatttatctttcttgccagtattactgcatattgtcccaatgtttcgatgtgatgttctaacctatcaactgccgctgtatcacaacaatagtgtccgatgaaattaagattatgatccaatgtgtttaatatatgattatcaagtcttatacgatccgcgtcttttttgacaggatcaggttcttctacaggaagaagtttcggcctcttatgatattcatgtctgggaaacggtggtctagggtgaggctccggtatcggagtgggttttggattataatcatcatcgtctatgacatcatcttcgacttcgatatttattttgctatcttgatgatgtcctgtatcagttgcattttcagcactcgactgaatattagcgcattcattgtctattattaccatatttctaaacccaaaatgtatgtgttgaacatcagtactatcgttgatgagtcttatagcatgaattcgcttatcgttatcgggtttatcttctgtcaccttagcaattccttttttattaaactctacataatcatatccatttctattgtttgttctaatataaacgagtatagcatcattgctaaatttttcaatagtatcaaaaacagaatatcctaaaccatataatatatattcaggaacactcaaactaaatgtccaggattctcctaaatacgtaaactttaatagtgcgaaatcattcaaaaatctaccacttatagatagatagtacataaatgcgtatagtagtctacctatctctttattatgaaaaccggcattacgatcatatatgtcgtgatatacctgtgatccgtttacgttaaaccataaatacatgggtgatcctataaacatgaatttatttctaattctcagagctatagttaattgaccgtgtaatatttgcttacatgcatacttgatacgcttattaataagatttttatcattgctcgttatttcagaatcgtatatataaggagtaccatcgtgattcttaccagatattatacaaaatactatatataaaatatattgacccacgttagtaatcatataaatgtttaacgttttaaattttgtattcaatgatccattatcatacgctatcatggtcttgtaatattcattctttaaaatataatattgtgttagccattgcattggagctcctaatggagattttctattctcatccattttaggataggctttcataaagtccctaataacttcgtgaataatgtttctatgttttctactgatgcatgtatttgcttcgatttttttatcccatgtttcatctatcatagatttaaacgcagtaatgctcgcaacattaacatcttgaaccgttggtacaattccgttccataaatttataatgttcgccatttatataactcattttttgaatatacttttaattaacaaaagagttaagttactcatatggacgccgtccagtctgaacatcaatctttttagccagagatatcatagccgctcttagagtttcagcgtgattttccaacctaaatagaacttcatcgttgcgtttacaacacttttctatttgttcaaactttgttgttacattagtaatctttttttccaaattagttagccgttgtttgagagtttcctcattgtcgtcttcatcggctttaacaattgcttcgcgtttagcctctggctttttagcagcctttgtagaaaaaaattcagttgctggaattgcaagatcgtcatctccggggaaaagagttccgtccatttaaagtacagattttagaaactgacactctgcgttatttatatttggtacaacacatggattataaatattgatgttaataacatcagaaaatgtaaagtctatacattgttgcatcgtgttaaattttctaatggatctagtattattgggtccaacttctgcctgaaatccaaatatggaagcggatacaaaaccgtttcctggataaaccacacatctccacttttgctttacatcagaaattgtgtcgttgacatcttgaactctcctatctaatgccggtgttccacctatagattttgaatattcgaatgctgcatgagtagcattaaattccttaatattgccataattttcatatattgagtaaccctggataaaaagtaaacacaccgcagccgtcgctaccacaataaaaaaaattgatagagagttcatttataatctattagaagctgacaaaatttttttacacgcatcagacaatgctttaataaatagttcaacatctacttttgtcatatcgaaccgatggtatgattctaacctagaattacatccgaaaaagttgactatgttcatagtcattaagtcattaacaaacaacattccagactctggattataagacgatactgtttcgtcacaattacctaccttaatcatgtgattatgaatattggctattagagcaccttctaagaaatctataatatctttgaaacacgatttaaaatcaaaccacgaatatacttctacgaagaaagttagtttacccataggagaaataactataaatggagatctaaatacaaaatccggatctatgatagttttaacattattatattctctattaaatacctccacatctaaaaatgttaattttgaaactatgtcttcgtttattaccgtacctgaactaaacgctataagctctattgtttgagaactctttaaacgatattcttgaaatacatgtaacaaagtttcctttaactcggtcggtttatctaccatagttacagaatttgtatccttatctataatataataatcaaaatcgtataaagttatataattatcgcgttcagattgggatcttttcaaatagactaaaaaccccatttctctagtaagtatcttatgtatatgtttgtaaaatatcttcatggtgggaatatgctctaccgcagttagccattcctcattgacagcggtagatgtattagacaaaactattccaatgtttaacaagggccattttacgagattattaaatccttgtttgataaatgtagccaatgagggttcgagttcaacgacgattgaattctcttcccgcggatgctgcatgatgaacgacgggatgttgttcgattgatttggaattctttttcgactttttgtttatattaaatattttaaaatttatagcggatagcaattcatgtaccacggataatgtagacgcgtattgcgcatcgatatctttattattagataaatttatcaataaatgtgagaagtttgcctcgttaaggtcttccatttaaatattatataaacatttgtgtttgtaacttattcgtcttttatggaatagttttttactagtaaagctgcaattacacactttgtccgtaaaacataaatataaacaccagcttttatcaatcgttccaaaaagtcgacggcggacatttttaacatggcatctattttaaatacacttaggtttttggaaaaaacatcattttataattgtaacgattcaataactaaagaaaagattaagattaaacataagggaatgtcatttgtattttataagccaaagcattctaccgttgttaaatacttgtctggaggaggtatatatcatgatgatttggttgtattggggaaggtaacaattaataatctaaagatgatgctattttacatggatttatcatatcatggagtgacaagtagtggagcaatttacaaattgggatcgtctatcgatagactttctctaaataggactattgttacaaaagttaataattatgatgatacattttttgacgacgatgattgatcgctattgcacaattttgtttttgtactttctaatatagtgtttaggttctttttcatatgagaatattgatttactaaaatatctatgtttaacttttgttctatgacgtccttatcggcggtatcggtacatatacgtaattcaccttcacaaaatacggagtcttcgataataatagccaatcgattattggatctagctgtctgtatcatattcaacatgtttaatatatcctttcgtttcccctttacaggcatcgatcgtagcatattttccgcgtctgatatggaaatgttaaaactacaaaaatgcgtaatgttagcccgtcctaatattggtacgtgtctataagtttggcatagtagaataatagacgtgtttaaatgccttccaaagtttaagaattctattagagtattgcattttgatagtttatcgcctacatcatcaaaaataagtaaaaagtgtgctgattttttatgattttgtgcgacagcaatacatttttctatgttacttttagttcgtatcagattatattctagagattcctgactactaacgaaattaatatgatttggccaaatgtatccatcataatctgggttataaacgggtgtaaacaagaatatatgtttatattttttaactagtgtagaaaacagagatagtaaatagatagtttttccagatccagatcctcctgttaaaaccattctaaacggcatttttaataaattttctcttgaaaattgtttttcttggaaacaattcataattatatttacagttactaaattaatttgataataaatcaaaatatggaaaactaaggttgttagtagggaggagaacaaagaaggcacatcgtgatataaataacatttattatcatgatgacaccagaaaacgacgaagagcagacatctgtgttctccgctactgtttacggagacaaaattcagggaaagaataaacgcaaacgcgtgattggtctatgtattagaatatctatggttatttcactactatctatgattaccatgtccgcgtttctcatagtgcgcctaaatcaatgcatgtctgctaacgaggctgctattactgacgccgctgttgccgttgctgctgcatcatctactcatagaaaggttgcgtctagcactacacaatatgatcacaaagaaagctgtaatggtttatattaccagggttcttgttatatattacattcagactaccagttattctcggatgctaaagcaaattgcactgcggaatcatcaacactacccaataaatccgatgtcttgactacctggctcattgattatgttgaggatacatggggatctgatggtaatccaattacaaaaactacatccgattatcaagattctgatgtatcacaagaagttagaaagtatttttgtgttaaaacaatgaactaatatttatttttgtacattaataaatgaaatcgcttaatagacaaactgtaagtaggtttaagaagttgtcggtgccggccgctataatgatgatactctcaaccattattagtggcataggaacatttctgcattacaaagaagaactgatgcctagtgcttgcgccaatggatggatacaatacgataaacattgttatttagatactaacattaaaatgtctacagataatgcggtttatcagtgtcgtaaattacgagctagattgcctagacctgatactagacatctgagagtattgtttagtattttttataaagattattgggtaagtttaaaaaagaccaatgataaatggttagatattaataatgataaagatatagatattagtaaattaacaaattttaaacaactaaacagtacgacggatgctgaagcgtgttatatatacaagtctggaaaactggttaaaacagtatgtaaaagtactcaatctgtactatgtgttaaaaaattctacaagtgacaacaaaaaatgaattaataataagtcgttaacgtacgccgccatggacgccgcgtttgttattactccaatgggtgtgttgactataacagatacattgtatgatgatctcgatatctcaatcatggactttataggaccatacattataggtaacataaaaactgtccaaatagatgtacgggatataaaatattccgacatgcaaaaatgctactttagctataagggtaaaatagttcctcaggattctaatgatttggctagattcaacatttatagcatttgtgccgcatacagatcaaaaaataccatcatcatagcatgcgactatgatatcatgttagatatagaagataaacatcagccattttatctattcccatctattgatgtttttaacgctacaatcatagaagcgtataacctgtatacagctggagattatcatctaatcatcaatccttcagataatctgaaaatgaaattgtcgtttaattcttcattctgcatatcagacggcaatggatggatcataattgatgggaaatgcaatagtaattttttatcataaaagttgtaaagtaaataataaaacaataaatattgaactagtagtacgtatattgagcaatcagaaatgatgctggtacctcttatcacggtgaccgtagttgcgggaacaatattagtatgttatatattatatatttgtaggaaaaagatacgtactgtctataatgacaataaaattatcatgacaaaattaaaaaagataaagagttctaattccagcaaatctagtaaatcaactgatagcgaatcagactgggaggatcactgtagtgctatggaacaaaacaatgacgtagataatatttctaggaatgagatattggacgatgatagcttcgctggtagtttaatatgggataacgaatccaatgttatggcgcctagcacagaacacatttacgatagtgttgctggaagcacgctgctaataaataatgatcgtaatgaacagactatttatcagaacactacagtagtaattaatgaaacggagactgttgaagtacttaatgaagataccaaacagaatcctaactattcatccaatcctttcgtaaattataataaaaccagtatttgtagcaagtcaaatccgtttattacagaacttaacaataaatttagtgagaataatccgtttagacgagcacatagcgatgattatcttaataagcaagaacaagatcatgaacacgatgatatagaatcatcggtcgtatcattggtgtgattagtttcctttttataaaattgaagtaatatttagtattattgctgccgtcacgttgtacaaatggagatattccctgtattcggcatttctaaaattagcaattttattgctaataatgactgtagatattatatagatacagaacatcaaaaaattatatctgatgagatcaatagacagatggatgaaacggtacttcttaccaacatcttaagcgtagaagttgtaaatgacaatgagatgtaccatcttattcctcatagattatcgacgattatactctgtattagttctgtcggaggatgtgttatctctatagataatgacatcaatggcaaaaatattctaacctttcccattgatcatgctgtaatcatatccccactgagtaaatgtgtcgtagttagcaagggtcctacaaccatattggttgttaaagcggatatacctagcaaacgattggtaacatcgtttacaaacgacatactatatgtaaacaatctgtcactgattaattatttgccgttgtctgtattcattattagacgagtcaccgactatttggatagacacatatgcgatcagatatttgctaataataagtggtattcccttataaccatcgacgataagcaatatcctattccatcaaactgtataggtatgtcctctgccaagtacataaattctagcatcgagcaagatactttaatccatgtttgtaacctcgagcatccgttcgactcagtatacaaaaaaatgcagtcgtacaattctctacctatcaaggaacaaatattgtacggtagaattgataatataaatatgagcattagtatttctgtggattaatagatttctagtatggggatcattaatcatctctaatctctaaatacctcataaaacgaaaaaaaagctattatcaaatactgtacggaatggattcattctcttctctttttatgaaactctgttgtatatctactgataaaactggaagcaaaaaatctgatagaaagaataagaataagatcaaggattatatggaacacgattattataaaataacaatagttcctggttcctcttccacgtctactagctcgtggtattatacacatgcctagtaatagtctctttgcgttgacggaaagcagactagaaataacaggctaaaatgttcagacaccataatagttcccaacccagataataacagagttccatcaacacattcctttaaactcaatcccaaacccaaaaccgttaaaatgtatccggccaattgatagtagataatgaggtgtacagcgcatgataatttacacagtaaccaaaatgaaaatactttagtaattataagaaatatagacggtaatgtcatcatcaacaatccgataatatgcctgagagtaaacattgacggataaaacaaaaatgctccgcataactctatcatggcaataacacaaccaaatacttgtaagattcctaaattagtagaaaatacaacgaatatcgatgtataagtgatctcgagaaataataagaataaagtaatgcccgtaaagataaacatcaacattgtttggtaatcattaaaccaattagtatgaagttgaactaatttcacagtagattttattccagtgttatcctcgcatgtataagtacctggtaagatatctttatattccataatcaatgagacatcactatctgataacgaatgaagtctagcactagtatgccatttacttaatattgtcgtcttggaagttttattataagttaaaatatcatggttatccaatttccatctaatatactttgtcggattatctatagtacacggaataatgatggtatcattacatgctgtatactctatggtctttgtagttgttataacaaccaacgtatagaggtatatcaacgatattctaactcttgacattttttatttatttaaaatgatacctttgttatttattttattctattttgctaacggtattgaatggcataagtttgaaacgagtgaagaaataatttctacttacttattagacgacgtattatacacgggtgttaatggggcggtatacacattttcaaataataaactaaacaaaactggtttaactaataataattatataacaacatctataaaagtagaggatgcggataaggatacattagtatgcggaaccaataacggaaatcccaaatgttggaaaatagacggttcagacgacccaaaacatagaggtagaggatacgctccttatcaaaatagcaaagtaacgataatcagtcacaacggatgtgtactatctgacataaacatatcaaaagaaggaattaaacgatggagaagatttgacggaccatgtggttatgatttattcacggcggataacgtaattccaaaagatggtttacgaggagcattcgtcgataaagacggtacttatgacaaagtttacattcttttcactgatactatcggctcaaagagaattgtcaaaattccgtatatagcacaaatgtgcctaaacgacgaaggtggtccatcatcattgtctagtcatagatggtcgacgtttctcaaagtcgaattagaatgtgatatcgacggaagaagttatagacaaattattcattctagaactataaaaacagataatgatacgatactatatgtattcttcgatagtccttattccaagtccgcattatgtacctattctatgaataccattaaacaatctttttctacgtcaaaattggaaggatatacaaagcaattgccgtctccagctcctggtatatgtttaccagctggaaaagttgttccacataccacgtttgaagtcatagaacaatataatgtactagatgatattataaagcctttatctaaccaacctatcttcgaaggaccgtctggtgttaaatggttcgatataaaggagaaggaaaatgaacatcgggaatatagaatatacttcataaaagaaaattctatatattcgttcgatacaaaatctaaacaaactcgtagctcgcaagtcgatgcgcgactattttcagtaatggtaactgcgaaaccgttatttatagcagatatagggataggagtaggaatgccacaaatgaaaaaaatacttaaaatgtaatcttaatcgagtacaccacacgacaatgaacaaacataagacagattatgctggttatgcttgctgcgtaatatgcggtctaattgtcggaattatttttacagcgacactattaaaagttgtagaacgtaaattagttcatacaccattaatagataaaacgataaaagatgcatatattagagaagattgtcctactgactggataagctataataataaatgtatccatttatctactgatcgaaaaacctgggaggaaggacgtaatgcatgcaaagctctaaattcaaattcggatctaattaagatagagactccaaacgagttaagttttttaagaagccttagacgaggctattgggtaggagaatccgaaatattaaaccagacaaccccatataattttatagctaagaatgccacgaagaatggaactaaaaaacggaaatatatttgtagcacaacgaatactcccaaactgcattcgtgttacactatataacaattacactacatttttatcataccactacttcggttagatgttttagaaaaaaataaatatcgccgtaccgttcttgtttttataaaaataacaattaacaattatcaaattttttctttaatattttacgtggttgaccattcttggtggtaaaataatctcttagtgttggaatggaatgctgtttaatgtttccacactcatcgtatattttgacgtatgtagtcacatcgtttacgcaatagtcagactgtagttctatcatgcttcctacatcagaaggaggaacagttttaaagtctcttggttttaatctattaccgttagttttcatgaaatcctttgttttatccacttcacattttaaataaatgtccactatacattcttttgttaattttactagatcgtcatgggtcatagaatttataggttccgtagtccatggatccaaactagcaaacttcgcgtatacggtatcgcgattagtgtatacaccaactgtatgaaaattaagaaaacagtttaataaatcaacagaaatatttaatcctccgtttgatacagatgcgccatatttatggatttcggattcacacgttgtttgtctgaggtgttcgtctagtgttgcttctacgtaaacttcgattcccatatattctttattgtcagaatcgcataccgatttatcatcatacactgtttgaaaactaaatggtatacacatcaaaataataaataataacgagtacattctgcaatattgttatcgtaattggaaaattagtgttcgagtgagttggattatgtgagtattggattgtatattttattttatattttgtaataagaataaaatgctaatgtcaagtcttattaaaaacatatataataaataacaatggctgaatggcataaaataataagttcgaggatgccgccatcgttgattacaagactacaaagaatgttctagctgctattcctaacagaacatttgccaagattaatccgggtgaaattattcctctcatcactaatcgtaatattctaaaacctcttattggtcagaaatattgtattgtatatactaactctctaatggatgagaacacgtatgctatggagttgcttactgggtacgcccctgtatctccgatcgttatagcgagaactcataccgcacttatatttttgatgggtaagccaacaacatccagacgtgacgtgtatagaacgtgtagagatcacgctacccgtgtacgcgcaactggtaattaaaataaaaagtaatattcatatgtagtgtcaattttaaatgatgatgaaatggataatatccatattgacgatgtcaataatgccggtattggcatacagctcatcgatttttagatttcattcagaggatgtggaattatgttatgggcatttgtattttgataggatctataatgtagtaaatataaaatataatccgcatattccatatagatataattttattaatcgcacgttaaccgtagatgaactagacgataatgtcttttttacacatggttattttttaaaacacaaatatggttcacttaatcctagtttgattgtctcattatcaggaaacttaaaatataatgatatacaatgctcagtaaatgtatcgtgtctcattaaaaatttggcaacgagtacatctactatattaacatctaaacataagacttattctctacatcggtccacgtgtattactataataggatacgattctattatatggtataaagatataaatgacaagtataatgacatctatgattttactgcaatatgtatgctaatagcgtctacattgatagtgaccatatacgtgtttaaaaaaataaaaatgaactcttaattatgctatgctattagaaatggataaaatcaaaattacggttgattcaaaaattggtaatgttgttaccatatcgtataacttggaaaagataactattgatgtcacacctaaaaagaaaaaagaaaaggatgtattattagcgcaatcagttgctgtcgaagaggcaaaagatgtcaaggtagaagaaaaaaatattatcgatattgaagatgacgatgatatggatgtagaaagcgcataatactatctataaaaataagtatataataaatactttttatttacggtactcttgtagtggtgataccctactcgattatttttttaaaaaaaaaatacttattctgattcttctaaccatttccgtgttcgtttgaatgccacatcgacgtcaaagataggggagtagttgaaatctagttctgcattgttggtacgcacctcaaatgtagtgttggatatcttcaacgtatagttgttgagtagtgatggttttctaaatagaattctcttcatatcattcttgcacgcgtacatttttagcatccatcttggaatcctagatccttgttctattcccaatggtttcatcaatagaagattaaacatatcgtacgaacacgatggagagtaatcgtagcaaaagtaagcatttcctttaatcttagatcccggatactggatatattttgcagccaacacgtgcatccatgcaacatttcctacatatacccggctatgcaccgcgtcatcatcgactgtacgatacataatgttaccgtgttgcttacattgctcgtaaaagactttcgtcaatttgtctccttctccgtaaattctagtgggtcttaggcaacaagtatacaattttgctccattcatgattacggaattattggctttcataaccagttgctcggccatacgtttactttttgcgtatacatgtcctggtgatatatcataaagggtatgctcatggccgatgaatggatcaccgtgtttattgggtcctattgcttccatgctactagtatagatcaaatacttgattcctaggtccacacaagctgccaaaatagtctgtgttccataatagtttactttcatgatttcattatcggtgtattttccaaatacatccactagagcagccgtatgaataatcagatttaccccatctagcgcttctctcaccttatcaaagtcgtttatatcacattgtatatagtttataaccttaactttcgaggttattggttgtggatcttctacaatatctatgactctgatttcttgaacatcatctgcactaattaacagttttactatatacctgcctagaaatccggcaccaccagtaaccgcgtacacggccattgctgccactcataatatcagactacttattctattttactaaataatggctgtttgtataatagaccacgataatatcagaggagttatttactttgaaccagtccatggaaaagataaagttttaggatcagttattggattaaaatccggaacgtatagtttaataattcatcgttacggagatattagtcaaggatgtgattccataggcagtccagaaatatttatcggtaacatctttgtaaacagatatggtgtagcatatgtttatttagatacagatgtaaatatatctacaattattggaaaggcgttatctatttcaaaaaatgatcagagattagcgtgtggagttattggtatttcttacataaatgaaaagataatacattttcttacaattaacgagaatggcgtttgatatatcagttaatgcgtctaaaacaataaatgcattagtttacttttctactcagcaaaataaattagtcatacgtaatgaagttaatgatacacactacactgtcgaatttgatagggacaaagtagttgacacgtttatttcatataatagacataatgacaccatagagataagaggggtgcttccagaggaaactaatattggttgcgcggttaatacgccggttagtatgacttacttgtataataagtatagttttaaactgattttagcagaatatataagacacagaaatactatatccggcaatatttattcggcattgatgacactagatgatttggctattaaacagtatggagacattgatctattatttaatgagaaacttaaagtagactccgattcgggactatttgactttgtcaactttgtaaaggatatgatatgttgtgattctagaatagtagtagctctatctagtctagtatctaaacattgggaattgacaaataaaaaatataggtgtatggcattagccgaacatatatctgatagtattccaatatctgagctatctagactacgatacaatctatgtaagtatctacgcggacacactgagagcatagaggataaatttgattattttgaagacgatgattcgtctacatgttctgccgtaaccgacagggaaacggatgtataattttttttatagcgtgaaggatatgataaaaaatataattgttgtatttatcccattccaatcaccttatatgattctgtaacacaataaaggagtcttatagatgtatagaggtcagatactggtttgataaactgtttattccacataagtatgtttgactttatggttagacccgcatactttaacaaatcactgaaaattggagttaggtattgacctctcagaatcagttgccgttctggaacattaaatgtattttttatgatatactccaacgcatttatgtgggcatacaacaagtcattactaatggaatattccaagagttttagttgtctagtatttaacaagagaagagatttcaacagactgtttatgaactcgaatgccgcctcattgtcgcttatattgatgatgtcgaattctcccaatatcatcaccgatgagtagctcatcttgttatcgggatccaagttttctaaagatgtcattaaaccctcgatcatgaatggatttatcatcatcgtttttatgttggacatgagcttagtccgtttgtccacatctatagaagatgatttctgaattatttcatatatctctctctttaactccaggaacttgtcaggatggtctactttaatatgttctcgtctaagagatgaaaatctttggatggttgcacgcgacttttctctaaaggatgacgttgcccaagatcctctcttaaatgaatccatcttatccttggacaagatggacagtctattttccttagatggtttaatatttttgttacccatgatctataaaggtagacctaatcgtctcggatgaccatatatttattttcagttttattatacgcataaattgtaaaaaatatgttaggtttacaaaaatgtctcgtggggcattaatcgtttttgaaggattggacaaatctggaaaaacaacacaatgtatgaacatcatggaatctataccggcaaacacgataaaatatcttaactttcctcagagatccactgtcactggaaaaatgatagatgactatctaactcgtaaaaaaacctataatgatcatatagttaatctattattttgtgcaaatagatgggagtttgcatcttttatacaagaacaactagaacagggaattactttaatagttgatagatacgcattttctggagtagcgtatgccgccgctaaaggcgcgtcaatgactctcagtaagagttatgaatctggattgcctaaacccgacttagttatattcttggaatctggtagcaaagaaattaatagaaacgtcggtgaggaaatttatgaagatgttacattccaacaaaaggtattacaagaatataaaaaaatgattgaagaaggagatattcattggcaaattatttcttctgaattcgaggaagatgtaaagaaggagttgattaagaatatagttatagaggctatacacacggttactggaccagtggggcaactgtggatgtaatagtgaaattacattttttataaatagatgttagtacagtgttataaatggatgaagcatattactctggcaacttggaatcagtactcggatacgtgtccgatatgcataccgaactcgtatcaatatctcaattagttattgccaagatagaaactatagataatgatatattaaacaaggacattgtaaattttatcatgtgtagatcaaacttggataatccatttatctctttcctagatactgtatatactattatagatcaagagaactatcagactgagttgattaattcattagacgacaatgaaattatcgattgtatagttaataagtttatgagcttttataaggataacctagaaaatatagtagatgctatcatcactctaaaatatataatgaataatccagattttaaaactacgtatgcagaagtactcggttccagaatagcggatatagatattaaacaagtgatacgtgagaatatactacaattgtctaataatatccgcgaacgatatttgtgaaaatattaaaaaaaaatactttttttattaaatgacgtcttttcgtgaatttagaaaattatgctgtgctatatatcacgcatcaggatataaagaaaaatctaaattaattagagactttataacagatagggatgataaatatttgatcattaagctattgcttcccggattagacgatagaatttataacatgaacgataaacaaattataaaattatatagtataatatttaaacaatctcaggaagatatgctacaagatttaggatacggatatataggagacactattaggactttcttcaaagagaacacagaaatccgtccacgagataaaagcattttaactttagaagaagtggatagtttcttaactacgttatcatccgtaactaaagaatcgcatcaaataaaattattgactgatatcgcatccgtttgtacatgtaatgatttaaaatgtgtagtcatgcttattgataaagatctaaaaattaaagcgggtcctcggtacgtacttaacgctattagtcctcatgcctatgatgtgtttagaaaatctaataacttgaaagagataatagaaaatgcatctaaacaaaatctagactctatatctatttctgttatgactccaattaatcccatgttagcggaatcgtgtgattctgtcaataaggcgtttaaaaaatttccatcaggaatgtttgcggaagtcaaatacgatggtgaaagagtacaagttcataaaaataataacgagtttgccttctttagtagaaacatgaaaccagtactctctcataaagtggattatctcaaagaatacataccgaaagcatttaaaaaagctacgtctatcgtattggattctgaaattgttcttgtagacgaacataatgtaccgctcccgtttggaagtttaggaatacacaaaaagaaagaatataaaaactctaacatgtgtttgttcgtgtttgactgtttgtactttgatggattcgatatgacggacattccattgtacgaacgaagatcttttctcaaagatgttatggttgaaatacccaatagaatagtattctcagagttgacgaatattagtaacgagtctcagttaactgacgtattggatgatgcactaacgagaaaattagaaggattggtcttaaaagatattaatggagtatacgaaccgggaaagagaagatggttaaaaataaagcgagactatttgaacgagggttccatggcagattctgccgatttagtagtactaggtgcttactatggtaaaggagcaaagggtggtatcatggcagtctttctaatgggttgttacgacgatgaatccggtaaatggaagacggttaccaagtgttcaggacacgatgataatacgttaagggagttgcaagaccaattaaagatgattaaaattaacaaggatcccaaaaaaattccagagtggttagtagttaataaaatctatattcccgattttgtagtagaggatccgaaacaatctcagatatgggaaatttcaggagcagagtttacatcttccaagtcccataccgcaaatggaatatccattagatttcctagatttactaggataagagaggataaaacgtggaaagaatctactcatctaaacgatttagtaaacttgactaaatcttaatagttacatacaaactgaaaattaaaataacactatttagttggtggtcgccatggatggtgttattgtatactgtctaaacgcgctagtaaaacatggcgaggaaataaatcatataaaaaatgatttcatgattaaaccatgttgtgaaagagtttgtgaaaaagtcaagaacgttcacatcggcggacaatctaaaaacaatacagtgattgcagatttgccatatctggataatgctgtatcggatgtatgcaattcactgtataaaaagaatgtatcaagaatatccagatttgctaatttgataaagatagatgacgatgacaagactcctactggtgtatataattattttaaacctaaagatgccattcctgttattatatctataggaaaggatagagatgtctgtgaactattaatctcatcagacatatcgtgtgcatgcgtggagttaaattcatatcacgtagccattcttcccatggatgtttccttttttaccaaaggaaatgcatcattgattattctcctgtttgatttctctatcgatgcggcacctctcttaagaagtgtaaccgataataatgttattatatctagacaccagcgtctacatgacgagcttccgagttccaattggttcaagttttacataagtataaagtccgactattgttctatattatatatggttgttgatggatctgtgatgcatgcgatagctgataatagaactcacgcaattattagcaaaaatatattagacaatactacgattaacgatgagtgtagatgctgttattttgaaccacagattaggattcttgatagagatgagatgctcaatggatcatcgtgtgatatgaacagacattgtattatgatgaatttacctgatgtaggcgaatttggatctagtatgttggggaaatatgaacctgacatgattaagattgctctttcggtggctggtaatttaataagaaatcgagactacattcccgggagacgaggctatagctactacgtttacggtatagcctctagataatttttttaagcacgaaataaaaaacataattttaaaccaatctatttcatactattttgtgtgatcaccatggacataaagatagatattagtatttctggtgataaatttacggtgactactaggagggaaaatgaagaaagaaaaaaatatctacctctccaaaaagaaaaaactactgatgttatcaaacctgattatcttgagtacgatgacttgttagatagagatgagatgtttactattctagaggaatattttatgtacagaggtctattaggcctcagaataaaatatggacgactctttaacgaaattaaaaaattcgacaatgatgcggaagaacaattcggtactatagaagaactcaagcagaaacttagattaaattctgaagagggagcagataactttatagattatataaaggtacaaaaacaggatatcgtcaaacttactgtatacgattgcatatctatgataggattgtgtgcatgcgtggtagatgtttggagaaatgagaaactgttttctagatggaaatattgtttacgagcgattaaactgtttattgatgatcacatgcttgataagataaaatctatactgcagaatagactagtatatgtggaaatgtcatagaaagttaaaagttaatgagagcaaaaatatataaggttgtattccatatttgttattttttctgtaatagttaaaaaaatacattcgatggtctatctatcagattattatgtgttataaggtactttttctcataataaactagagtatgagtaagatagtgtttttcaaaacatataaatctaaaattgatggatgagatatacagctattaatttcgaaaatatattttaatctgataactttaaacatggatttttgatggtggtttaacgttttaaaaaaagattttgttattgtagtatatgataatattaaaagatggatataaagaatttgctgactgcatgtactattttttacattactacattggctacggcagatatacctacttcgtcaccaacggggcatgtgacgagggagaatatcttgataagaggcataatcaatgttgtaatcagtgtccacctggagaatttgccaaggttagatgtaatggtaacgataacacaaaatgtgaacgctgcccacctcatacatataccgcaatccccaattactctaatggatgtcatcaatgtagaaaatgcccaacaggatcatttgataaggtaaagtgtaccggaacacagaacagtaaatgttcgtgtcttcctggttggtattgcgctactgattcttcacagactgaagattgtcgagattgtataccaaaaaggagatgtccatgcggatactttggtggaatagatgaacaaggaaatcctatttgtaaatcgtgttgtgttggtgaatattgcgactacctacgtaattatagacttgatccatttcctccatgcaaactatctaaatgtaattaattatgattttgatgataatgttaccatacattatatcgctacttggttagtgtattattcagtatgaagacctattaataattacttatcttttgacgatcttgttataattataatataaaaacttatggcatagtaacttataattgctgacgcgataaattcgtaataatctgttttgttcaaaggaatctacaggcataaaaataaaaatataatttataatatactcttacaacgccatcatgaataacagcagtgaattgattgctgttattaatggatttagaaatagtggacgattttgtgatattagtatagttattaatgatgaaaggataaacgctcataaactcatcctatctggagcctccgaatatttttccattctgttttccaataattttatcgattctaatgaatacgaagttaatctaagtcatttagattatcaaagtgttaacgatttgatcgattatatttatgggatacctttgagcctaactaacgataacgtgaaatatattctttcaaccgctgattttttacaaattggatctgccattactgagtgtgaaaattacatacttaaaaatctttgttctagaaactgtatcgatttctacatatacgctgataaatataataacaagaaaatagaatcagcgtcgtttaacacaatattacaaaatattttgagactcatcaacgatgaaaactttaaatacttaacagaggaatcaatgataaaaattttaagcgatgatatgttaaatataaaaaatgaggatttcgccccactaattctcattaaatggttagagagtactcaacaaccatgcaccgtcgagttacttaaatgcctcagaatatcattgctttccccacaagttataaaatcactttatagtcatcgactggttagttcaatctacgaatgtataacattcttaaacaatatagcattcttggatgaatcatttcctagataccatagcatcgagttgatatctatcggtataagtaattcgcatgataagatttccataaactgctacaatcataaaaaaaatacatgggaaatgatatcttcacgtagatataggtgtagtttcgcagtggccgtcctggataatattatctatatgatgggtggatatgatcagtccccgtatagaagttcaaaggttatagcgtacaatacatgtacaaattcttggatatatgatataccagagctaaaatatcctcgttctaattgtgggggactggctgatgacgaatacatttattgtataggcggcatacgcgatcaggattcatcgttgacatctagtattgatagatggaagccatcaaaaccatattggcagaagtatgctaaaatgcgcgaaccaaaatgtgatatgggggttgcgatgttaaacggattaatatatgttataggtggaatcgttaaaggtgacacgtgtaccgacgcactagagagtttatcagaagatggatggatgaagcatcaacgtcttccaataaaaatgtccaatatgtcgacgattgttcatgatggcaagatttatatatctggaggttacaacaatagtagtgtagttaatgtaatatcgaatctagtccttagctataattcgatatatgatgaatggaccaaattatcatcattaaacattcctagaattaatcccgctctatggtcagcgcataataaattatatgtaggaggaggaatatctgatgatgttcgaactaatacatctgagacatacgacaaagaaaaagattgttggacattggataatggtcacgtgttaccacgcaattatataatgtataaatgcgaaccgattaaacataaatatccattggaaaaaacacagtacacgaatgattttctaaagtatttggaaagttttataggtagttgatagaacaaaatacataattttgtaaaaataaatcactttttatactaatatgacacgattaccaatacttttgttactaatatcattagtatactctacaccttctcctcagacatctaaaaaaataggtgatgatgcaactctatcatgtaatcgaaataatacaaatgactacgttgttatgagtgcttggtataaggagcccaattccattattcttttagctgctaaaagcgacgtcttgtattttgataattataccaaggataaaatatcttacgactctccatacgatgatctagttacaactatcacaattaaatcattgactgctagagatgccggtacttatgtatgtgcattctttatgacatcgcctacaaatgacactgataaagtagattatgaagaatactccacagagttgattgtaaatacagatagtgaatcgactatagacataatactatctggatctacacattcaccggaaactagttctgagaaacctgattatatagataattctaattgctcgtcggtattcgaaatcgcgactccggaaccaattactgataatgtagaagatcatacagacaccgtcacatacactagtgatagcattaatacagtaagtgcatcatctggagaatccacaacagacgagactccggaaccaattactgataaagaagaagatcatacagtcacagacactgtctcatacactacagtaagtacatcatctggaattgtcactactaaatcaaccaccgatgatgcggatctttatgatacgtacaatgatacagtaccaccaactactgtaggcggtagtacaacctctattagcaattataaaaccaaggactttgtagaaatatttggtattaccgcattaattatattgtcggccgtggcaatattctgtattacatattatatatataataaacgttcacgtaaatacaaaacagagaacaaagtctagatttttgacttacataaatgtctgggatagtaaaatctatcatattgagcgggccatctggtttaggaaagacagccatagccaaaagactatgggaatatatttggatttgtggtgtcccataccactagatttcctcgtcctatggaacgagaaggtgtcgattaccattacgttaacagagaggccatctggaagggaatagccgccggaaactttctagaacatactgagtttttaggaaatatttacggaacttctaaaacagctgtgaatacagcggctattaataatcgtatttgtgtgatggatctaaacatcgatggcgttagaagtcttaaaaatacgtacctaatgccttactcggtgtatataagacctacctctcttaaaatggttgagaccaagcttcgtcgtagaaacactgaagcggatgatgagattcatcgtcgtgtgatgttggcaaaaactgacatggatgaggcaggtgaagccggtctattcgacactattatcattgaagatgatgtgaatttagcatatagtaagttaattcagatactacaggaccgtattagaatgtattttaacactaattagagacttaagacttaaaacttgataattaataatataactcgtttttatatgtggctatttcaacgtctaatgtattagttaaatattaaaacttaccacgtaaaacttaaaatttaaaatgatatttcattgacagatagatcacacattatgaactttcaaggacttgtgttaactgacaattgcaaaaatcaatgggtcgttggaccattaataggaaaaggtggattcggtagtatttatactactaatgacaataattatgtagtaaaaatagagcccaaagctaacggatcattatttaccgaacaggcattttatactagagtacttaaaccatccgttatcgaagaatggaaaaaatctcacaatataaagcacgtaggtcttatcacgtgcaaggcatttggtctatacaaatccattaatgtggaatatcgattcttggtaattaatagattaggtgtagatctagatgcggtgatcagagccaataataatagattaccaaaaaggtcggtgatgttgatcggaatcgaaatcttaaataccatacaatttatgcacgagcaaggatattctcacggagatattaaagcgagtaatatagtcttagatcaaatagataagaataaattatatctagtggattacggattggtttctaaattcatgtctaatggcgaacatgttccatttataagaaatccaaataaaatggataacggtactctagaatttacacctatagattcgcataaaggatacgttgtatctagacgtggagatctagaaacacttggatattgtatgattagatggttgggaggtatcttaccatggactaagatatctgaaacaaagaattgtgcattagtaagtgccacaaaacagaaatatgttaacaatactgcgactttgttaatgaccagtttgcaatatgcacctagagaattgctgcaatatattaccatggtaaactctttgacatattttgaggaacccaattacgacaagtttcggcacatattaatgcagggtgtatattattaagtgtggtgtttggtcgataaaaattaaaaaataacttaatttattattgatctcgtgtgtacaaccgaaatcatggcgatgttttacgcacacgctctcggtgggtacgacgagaatcttcatgcctttcctggaatatcatcgactgttgccaatgatgtcaggaaatattctgttgtgtcagtttataataacaagtatgacattgtaaaagacaaatatatgtggtgttacagtcaggtgaacaagagatatattggagcactgctgcctatgtttgagtgcaatgaatatctacaaattggaaatccgatccatgatcaagaaggaaatcaaatctctatcatcacatatcgccacaaaaactactatgctctaagcggaatcgggtacgagagtctagacttgtgtttggaaggagtagggattcatcatcacgtacttgaaacaggaaacgctgtatatggaaaagttcaacatgattattctactatcaaagagaaggccaaagaaatgagtgcacttagtccaggacctatcatcgattaccacgtctggataggagattgtatctgtcaagttactgctgtggacgtacatggaaaggaaattatgaaaatgagattcaaaaagggtgcggtgcttccgatcccaaatctggtaaaagttaaacttggggagaatgatacagaaaatctttcttctactatatcggcgacaccatcgaggtaaccacctctctggaagacagcgtgaataatgtactcatgaaacgtttggaaactatacgccatatgtggtctgttgtatatgatcattttgatattgtgaatggtaaagaatgctgttatgtgcatacgcatttgtctaatcaaaatcttataccgagtactgtaaaaacaaatttgtacatgaagactatgggatcatgcattcaaatggattccatggaagctctagagtatcttagcgaactgaaggaatcaggtggatggagtcccagaccagaaatgcaggaatttgaatatccagatggagtggaagacactgaatcaattgagagattggtagaggagttcttcaatagatcagaacttcaggctggtgaatcagtcaaatttggtaattctattaatgttaaacatacatctgtttcagctaagcaactaagaacacgtatacggcagcagcttccttctatactctcatcttttaccaacacaaagggtggatatttgttcattggagttgataataatacacacaaagtatttggattcacggtgggttacgactacctcagactgatagagaatgatatagaaaagcatatcaaaagactttgtgttgtgtatttctgtgagaagaaagaggacatcaagtacgcgtgtcgattcatcaaggtatataaacctggggatgaggctacctcgacatacgtgtgcgctatcaaagtggaaagatgctgttgtgctgtgtttgcagattggccagaatcatggtatatggatactaatggtatcaagaagtattctccagatgaatgggtgtcacatataaaattttaattaatgtaactatagagaacaaataataaggttgtaatatcatatagacaataactaacaattaattagtaactgttatctcttttttaattaaccaactaactatatacctattaatacatcgtaattatagttcttaacatctattaatcattaattcgcttctttaattttttataaactaacattgttaattgaaaagggataacatgttacagaatataaattatatatggatttttttaaaaaggaaatacttgactggagtatatatttatctcttcattatatagcacgcgtgttttccaatttttccacatcccatataatacaggattataatctcgttcgaacatacgagaaagtggataaaacaatagttgattttttatctaggttgccaaatttattccatattttagaatatggggaaaatattctacatatttattctatggatgatgctaatacgaatattataattttttttctagatagagtattaaatattaataagaacgggtcatttatacacaatctcgggttatcatcatccattaatataaaagaatatgtatatcaattagttaataatgatcatccagataataggataagactaatgcttgaaaatggacgtagaacaagacattttttgtcctatatatcagatacagttaatatctatatatgtattttaataaatcatggattttatatagatgccgaagacagttacggttgtacattattacatagatgtatatatcactataagaaatcagaatcagaatcatacaatgaattaattaagatattgttaaataatggatcagatgtagataaaaaagatacgtacggaaacacaccttttatcctattatgtaaacacgatatcaacaacgtggaattgtttgagatatgtttagagaatgctaatatagactctgtagactttaatagatatacacctcttcattatgtctcatgtcgtaataaatatgattttgtaaagttattaatttctaaaggagcaaatgttaatgcgcgtaataaattcggaactactccattttattgtggaattatacacggtatctcgcttataaaactatatttggaatcagacacagagttagaaatagataatgaacatatagttcgtcatttaataatttttgatgctgttgaatctttagattatctattatccagaggagttattgatattaactatcgtactatatacaacgaaacatctatttacgacgctgtcagttataatgcgtataatacgttggtctatctattaaacaaaaatggtgattttgagacgattactactagtggatgtacatgtatttcggaagcagtcgcaaacaacaacaaaataataatggaagtactattgtctaaacgaccatctttgaaaattatgatacagtctatgatagcaattactaaacataaacagcataatgcagatttattgaaaatgtgtataaaatatactgcgtgtatgaccgattatgatactcttatagatgtacagtcgctacagcaatataaatggtatattttaagatgtttcgatgaaatagatatcatgaagagatgttatataaaaaataaaactgtattccaattagttttttgtatcaaagacattaatactttaatgagatacggtaaacatccttctttcgtgaaatgcactagtctcgacgtatacggaagtcgtgtacgtaatatcatagcatctattagatatcgtcagagattaattagtctattatccaagaagctggatcctggagataaatggtcgtgttttcctaacgaaataaaatataaaatattggaaaactttaacgataacgaactatccacatatctaaaaatcttataaacattattaaaatataaaatctaagtaggataaaatcacactacatcattgtttccttttagtgctcgacagtgtatactatttttaacgctcataaataaaaatgaaaacgatttccgttgttacgttgttatgcgtactacctgctgttgtttattcaacatgtactgtacccactatgaataacgctaaattaacgtctaccgaaacatcgtttaatgataaccagaaagttacgtttacatgtgatcagggatatcattctttggatccaaatgctgtctgtgaaacagataaatggaaatacgaaaatccatgcaaaaaaatgtgcacagtttctgattatgtctctgaactatataataaaccgctatacgaagtgaattccaccatgacactaagttgcaacggcgaaacaaaatattttcgttgcgaagaaaaaaatggaaatacttcttggaatgatactgttacgtgtcctaatgcggaatgtcaacctcttcaattagaacacggatcgtgtcaaccagttaaagaaaaatactcatttggggaatatatgactatcaactgtgatgttggatatgaggttattggtgcttcgtacataagttgtacagctaattcttggaatgttattccatcatgtcaacaaaaatgtgatatgccgtctctatctaacggattaatttccggatctacattttctatcggtggcgttatacatcttagttgtaaaagtggttttacactaacggggtctccatcatccacatgtatcgacggtaaatggaatcccgtactcccaacatgtgtacgatctaacgaaaaatttgatccagtggatgatggtcccgacgatgagacagatttgagcaaactctcgaaagacgttgtacaatatgaacaagaaatagaatcgttagaagcaacttatcatataatcatagtggcgttgacaattatgggcgtcatatttttaatctccgttatagtattagtttgttcctgtgacaaaaataatgaccaatataagttccataaattgctaccgtgaatataaatccgttaaaataattaataatttaataacgaacaagtatcaaaagattaaagacttatagctagaatcaattgagatgtcttcttcagtggatgttgatatctacgatgccgttagagcatttttactcaggcactattataacaagagatttattgtgtatggaagaagtaacgccatattacataatatatacaggctatttacaagatgcgccgttataccgttcgatgatatagtacgtactatgccaaatgaatcacgtgttaaacaatgggtgatggatacacttaatggtataatgatgaatgaacgcgatgtttctgtaagcgttggcaccggaatactattcatggaaatgtttttcgattacaataaaaatagtatcaacaatcaactaatgtatgatataattaatagcgtatctataattctagctaatgagagatatagaagcgcttttaacgacgatggtatatacatccgtagaaatatgattaacaagttgtacggatacgcatctctaactactattggcacgatcgctggaggtgtttgttattatctgttgatgcatctagttagtttgtataaataattatttcaatatactagttaaaattttaagattttaaatgtataaaaaactaataacgtttttatttgtaataggtgcattagcatcctattcgaataatgagtacactccgtttaataaactgagtgtaaaactctatatagatggagtagataatatagaaaattcatatactgatgataataatgaattggtgttaaattttaaagagtacacaatttctattattacagagtcatgcgacgtcggatttgattccatagatatagatgttataaacgactataaaattattgatatgtataccattgactcgtctactattcaacgcagaggtcacacgtgtagaatatctaccaaattatcatgccattatgataagtacccttatattcacaaatatgatggtgatgagcgacaatattctattactgcagagggaaaatgctataaaggaataaaatatgaaataagtatgatcaacgatgatactctattgagaaaacatactcttaaaattggatctacttatatatttgatcgtcatggacatagtaatacatattattcaaaatatgatttttaaaaatttaaaatatattatcacttcagtgacagtagtcaaataacaaacaacaccatgagatatattataattctcgcagttttgttcattaatagtatacacgctaaaataactagttataagtttgaatccgtcaattttgattccaaaattgaatggactggggatggtctatacaatatatcccttaaaaattatggcatcaagacgtggcaaacaatgtatacaaatgtaccagaaggaacatacgacatatccgcatttccaaagaatgatttcgtatctttctgggttaaatttgaacaaggcgattataaagtggaagagtattgtacgggactatgcgtcgaagtaaaaattggaccaccgactgtaacattgactgaatacgacgaccatatcaatttgtacatcgagcatccgtatgctactagaggtagcaaaaagattcctatttacaaacgcggtgacatgtgtgatatctacttgttgtatacggctaacttcacattcggagattctaaagaaccagtaccatatgatatcgatgactacgattgcacgtctacaggttgcagcatagactttgtcacaacagaaaaagtgtgcgtgacagcacagggagccacagaagggtttctcgaaaaaattactccatggagttcgaaagtatgtctgacacctaaaaagagtgtatatacatgcgcaattagatccaaagaagatgttcccaatttcaaggacaaaatggccagagttatcaagagaaaatttaatacacagtctcaatcttatttaactaaatttctcggtagcacatcaaatgatgttaccacttttcttagcatgcttaacttgactaaatattcataactaatttttattaatgatacaaaaacgaaataaaactgcatattatacactggttaacgcccttataggctctaaccattttcaagatgaggtccctgattatagtccttctgttcccctctatcatctactccatgtctattagacgatgtgagaagactgaagaggaaacatggggattgaaaatagggttgtgtataattgccaaagatttctatcccgaaagaactgattgcagtgttcatctcccaactgcaagtgaaggattgataactgaaggcaatggattcagggatatacgaaacaccgataaattataaaaaaagcaatgtgtccgctgtttccgttaataatactattttcgtaactggcggattattcataaataactctaatagcacgatcgtggttaacaatatggaaaaacttgacatttataaagacaaacaatggtcgattatagaaatgcctatggctagggtatatcacggcatcgactcgacatttggaatgttatattttgccggaggtctatccgttaccgaacaatatggtaatttagagaaaaacaacgagatatcttgttacaatcctagaacgaataagtggtttgatatttcatatactatttataagatatccatatcatcattgtgtaaactaaataacgtcttctatgtatttagtaaggacattggatatgtggaaaagtatgatggtgcatggaagttagtacatgatcgtctccccgctataaaggcattatcaacttctccttattgattgaaaatgaaaatataaatagtttttatgtatagcagtattaccctatagttttattgcttactactaacatggatacagatgttacaaatgtagaagatatcataaatgaaatagatagagagaaagaagaaatactaaaaaatgtagaaattgaaaataataaaaacattaacaagaatcatcccaatgaatatattagagaagcactcgttattaataccagtagtaatagtgattccattgataaagaagttatagaatgtatcagtcacgatgtaggaatatagatcatatctactaatttttataatcgatacaaaacataaaaaacaactcgttattacatagcaggcatggaatccttcaagtattgttttgataacgatggcaagaaatggattatcggaaatactttatattctggtaattcaatactctataaggtcagaaaaaatttcactagttcgttctacaattacgtaatgaagatagatcacaaatcacacaagccattgttgtctgaaatacgattctatatatctgtattggatcctttgactatcgacaactggacacgggaacgtggtataaagtatttggctattccagatctgtatggaattggagaaaccgatgattatatgttcttcgttataaagaattcgggaagagtattcgccccaaaggatactgaatcagtcttcgaagcatgcgtcactatgataaacacgttagagtttatacactctcgaggatttacccatggaaaaatagaaccgaggaatatactgattagaaataaacgtctttcactaattgactattctagaactaacaaactatacaagagtggaaactcacatatagattacaacgaggacatgataacttcaggaaatatcaattatatgtgtgtagacaatcatcttggagcaacagtttcaagacgaggagatttagaaatgttgggatattgcatgatagaatggttcggtggcaaacttccatggaaaaacgaaagtagtataaaagtaataaaacaaaaaaaagaatataaaaaatttatagctactttctttgaggactgttttcctgaaggaaatgaacctctggaattagttagatatatagaattagtatacacgttagattattctcaaactcctaattatgacagactacgtaaactgtttatacaagattgaaattatattcttttttttatagagtgtggtagtgttacggatatctaatattaatattagactatctctatcgcgctacacgaccaatatcgattactatggatatcttctatgaaaggagagaatgtatttatttctccagcgtcaatctcgtcagtattgacaatactgtattatggagctaatggatccactgctgaacagctatcaaaatatgtagaaacggaggagaacacggataaggttagcgctcagaatatctcattcaaatccatgaataaagtatatgggcgatattctgccgtgtttaaagattcctttttgagaaaaattggcgataagtttcaaactgttgacttcactgattgtcgcactatagatgcaatcaacaagtgtgtagatatctttactgaggggaaaatcaatccactattggatgaaccattgtctcctagcaattagtgccgtatactttaaagcaaaatggttgacgccattcgaaaaggaatttaccagtgattatcccttttacgtatctccgacggaaatggtagacgtaagtatgatgtctatgtacggcaaggcatttaatcacgcatctgtaaaagaatcattcggcaacttttcaatcatagaactgccatatgttggagatactagtatgatggtcattcttccagacaagattgatggattagaatccatagaacaaaatctaacagatacaaattttaagaaatggtgtgactttatggatgctatgtttatagatgttcacattcccaagtttaaggtaacaggctcgtataatctggtggatactctagtaaagtcaggactgacagaggtgttcggttcaactggagattatagcaatatgtgtaatttagatgtgagtgtcgacgctatgatccacaaaacgtatatagatgtcaatgaagagtatacagaagcagctgcagcaacttctgtactagtggcagactgtgcatcaacaattacaaatgagttctgtgcagatcatccgttcatctatgtgattaggcatgttgatggaaaaattcttttcgttggtagatattgctctccgacaactaattgttaaccattttttttaaaaaaaatagaaaaaacatgtggtattagtgcaggtcgttgttcttccaattgcaattggtaagatgacggccaactttagtacccacgtcttttcaccacagcactgtggatgtgacagactgaccagtattgatgacgtcaaacaatgtttgactgaatatatttattggtcgtcctatgcataccgcaacaggcaatgcgctggacaattgtattccacactcctctcttttagagatgatgcggaattagtgttcatcgacattcgcgagctggtaaaaaatatgccgtgggatgatgtcaaagattgtacagaaatcatccgttgttatataccggatgagcaaaaaaccatcagagagatttcggccatcatcggactttgtgcatatgctgctacttactggggaggtgaagaccatcccactagtaacagtctgaacgcattgtttgtgatgcttgagatgctaaattacgtggattataacatcatattccggcgtatgaattgatgagttgtacatcttgacattttctttcttctcttctccctttcttctcttctcccttcctccctcttctccctttcccagaaacaaacttttttacccactataaaataaaatgagtatactacctgttatatttctttctatatttttttattcttcattcgttcagacttttaacgcgtctgaatgtatcgacaaagggcaatattttgcatcattcatggagttagaaaacgagccagtaatcttaccatgtcctcaaataaatacgctatcatccggatataatatattagatattttatgggaaaaacgaggagcggataatgatagaattataccgatagataatggtagcaatatgctaattctgaacccgacacaatcagactctggtatttatatatgcattaccacgaacgaaacctactgtgacatgatgtcgttaaatttgacaatcgtgtctgtctcagaatcaaatatagattttatctcgtatccacaaatagtaaatgagagatctactggcgaaatggtatgtcccaatattaatgcatttattgctagtaacgtaaacgcagatattatatggagcggacatcgacgccttagaaataagagacttaaacaacggacacctggaattattaccatagaagatgttagaaaaaatgatgctggttattatacatgtgttttagaatatatatacggtggcaaaacatataacgtaaccagaattgtaaaattagaggtacgggataaaataataccttctactatgcaattaccagatggcattgtaacttcaataggtagtaatttgactattgcatcgttgagacctcccacaacggatgcagacgtcttttggataagtaatggtatgtattacgaagaagatgatggggacggaaacggtagaataagtgtagcaaataaaatctatatgaccgataagagacgtgttattacatcccggttaaacattaatcctgtcaaggaagaagatgctacaacgtttacgtgtatggcgtttactattcctagcatcagcaaaacagttactgttagtataacgtgaatgtatgttgttacatttccatgtcaattgagtttataagaatttttatacattatcttccaacaaacaattgacgaacgtattgctatgattaactcccacgatactatgcatattattaatcattaacttgcagactatacctagtgctattttgacatactcatgttcttgtgtaattgcggtatctatattattaaagtacgtaaatctagctatagttttattatttaattttagataatataccgtctccttatttttaaaaattgccacatcctttattaaatcatgaatgggaatttctatgtcatcgttagtatattgtgaacaacaagagcagatatctataggaaagggtggaatgcgatacattgatctatgtagttttaaaacacacgcgaactttgaagaatttatataaatcattccatcgatacatccttctatgttgagatgtatatatccaggaattcgtttattaatatcgggaaatgtataaactaaaacattgcccgaaagcggtgcctctatctgcgttatatccgttcttaacttacaaaatgtaaccaatacctttgcatgacttgttttgttcggcaacgttagtttaaacttgacgaatggattaattacaatagcatgatccgcgcatctattaagtttttttactttaacgcccttgtatgtttttacagagactttatctaaatttctagtacttgtatgtgttataaatataacgggatatagaaccgaatcacctaccttagatacccaattacattttatcagatccagataataaacaaattttgtcgccctaactaattctatattgttatatattttacaattggttatgatatcatgtaataacttggagtctaacgcgcatcgtcgtacgtttatacaattgtgatttagtgtagtatatctacacatgtatttttccgcactatagtattctggactagtgataaaactatcgttatatctgtcttcaatgaactcatcgagatattgctctctgtcatattcatacacctgcataaactttctagacatcttacaatccgtgttattttaggatcatatttacatatttacgggtatatcaaagatgttagattagttaatgggaatcgtctataataatgaatattaaacaattatatgaggacttttaccacaaagcatcataaaaatgagtcgtcgtctgatttatgttttaaatatcaaccgcgaatcaactcataaaatacaagagaatgaaatatatacatattttagtcattgcaatatagaccatacttctacagaacttgattttgtagttaaaaactatgatctaaacagacgacaacctgtaactgggtatactgcactacactgctatttgtataataattactttacaaacgatgtactgaagatattattaaatcatggagtggatgtaacgatgaaaaccagtagcggacgtatgcctgtttatatattgcttactagatgttgtaatatttcacatgatgtagtgatagatatgatagacaaagataaaaaccacttatcgcatagagactattccaacctactactagagtatataaaatctcgttacatgttattaaaggaagaggatatcgatgagaacatagtatccactttattagataagggaatcgatcctaactttaaacaagacggatatacagcgttacattattatttgtgtctcgcacacgtttataaaccaggtgagtgtagaaaaccgataacgataaaaaaggccaagcgaattatttctttgtttatacaacatggagctaatctaaacgcgttagataattgtggtaatacaccattccatttgtatcttagtattgaaatgtgtaataatattcatatgactaaaatgctgttgacttttaatccgaatttcaaaatatgtaataatcatggattaacgcctatactatgttatataacttccgactacatacaacacgatattcttgttatgttaatacatcactatgaaacaaatgttggagaaatgccgatagatgagcgtcgtataatcgtattcgagtttatcaaaacatattctacacgtccggcagattcgataacttatttgatgaataggtttaaaaatataaatatttatacccgctatgaaggaaagacattattacacgtagcatgtgaatataataatacacacgtaatagattatcttatacgtatcaacggagatataaatgcgttaaccgacaataacaaacacgctatccaactcattatagataacaaagaaaattccccatataccattaattgtttactgtatatacttagatatattgtagataagaatgtgataagatcgttggtggatcaacttccatctctacctatctttcgtcgcttatcatactagtcatatcctaaatgttgatcatattccaccaaatgattgtgaaagagattgagattaaatcgtctaacaaacaattagtttttatgacattaacatataataaataaattaatcattattgacttaacgatgacgaaagttatcatcatcttaggattcttgattattaatacaaattcattgtctatgaaatgtgaacaaggtgtctcatattataattcacaagaattaaagtgttgtaaactatgtaagccaggaacatattcagatcatcgatgtgataaatacagcgataccatttgtggacattgtccgagtgacacattcacgtcaatatataatcgttctccttggtgtcatagttgtagaggtccatgtggtactaatcgagtagaggtcacaccttgtacacctaccacaaatagaatctgtcattgtgactcgaatagttattgtctccttaaagcttttgatggtaactgtgttacatgtgctcctaaaacaaaatgtggtcgtgggtatggaaagaaaggagaagatgaaatgggtaataccatttgtaagaaatgtcggaagggtacttattcagatattgtatctgactctgatcaatgtaaaccaatgacaagataagacttactcgcatctactggatagacataaaatatcctcctcgtaataatgaaatataatatacactaattattaatatcaataacaatcgagtattaatatataggtcatttttaaatcccttttgggttccgtcccaaacggcgtttcggtctgcgtcgccgccatggccatgccgagcctctccgcgtgctcctccatcgaggacgacttcaactatggcagctcggtggcgtctgccagcgtgcacatacgaatggcatttctaagaaaagtctacggtatcctttgtctacaatttcttttaacaacggcaacaactgcagtatttttatactttgactgcatgcggacatttatacaagggagtcctgttctaatattggcatcaatgttcggatctataggcttgattttcgcattgactttacacagacataaacatcccctgaatctgtacctgctttgtggatttacactgtcggaatctctaacgctggcctctgttgttactttctatgatgtgcatgtcgttatgcaagctttcatgctgactactgcagcgtttcttgctctgactacatatactctacaatcaaagagagatttcagtaaacttggagcaggattgtttgctgctttgtggattttaattttgtcaggactcttggggatatttgtgcaaaatgagacagtgaagctggtcctgtctgcttttggggcccttgtattctgtggattcattatctatgacacgcactcactaatacataagctctcgcctgaagagtatgtgttagcctctatcaatctctacttggatatcatcaatctgttcttgcatctgttgcagcttttggaagtatctaataagaaataaagtttaaaatagaattaataaaaacatataggtcattttttaaacatggattggaaaccaaggtagttagttaatacacacaagatatatttttttcacatcatccacccatgggtaacaccaaggttgttagttaataatatacaagatattttttctcactctgatccatgtaaaccaaggacgagataagacactctcattcctcatctacaaccccattaaaaaatggaaattaaagccctctattagcatagacggctacaggtctaccatcaggttaaccttcgtctaccttcacaatggcctttccttgtgcccagttcagaccctgtcattgccacgctactaaggactccctgaataccgtggccgacgtcagacattgtctgactgaatacatcctgtgggtttctcatagatggacccatagagaaagcgcagggtctctctacaggcttctcatctctttcagaactgatgcaacggagctctttggtggtgagttgaaggattcacttccgtgggacaattgcgtggagatcattaaatgtttcatcagaaatgactccatgaaaaccgccgaagaacttcgtgcaatcattggactttgtactcaatcagctatcgtctctggaagagtcttcaacgataagtatatcgacatactacttatgctgcgaaagattctgaacgagaacgactatctcaccctcttggatcatatccgcactgctaaatactaaatctccttcatgctctctcactacactttttatcatcttatgaggaatgattgccttcgtgaaataggaataattagcaccagaatagctatggattattgtggtagagagtgcactattctatgtcgtctactggatgaagatgtgacgtacaaaaaaataaaaccagagattgaaacgtgtcacaacttatcaaaacatatagatagacgaggaaacaatgcgctacattgttacgtcttcaataaatgcgatacagacattaagattgttcggctgttactctctcgcggagtcgagagactttgtagaaacaacgaaggattaactccgctaggagcatacagtaagcatagatacgtcaaatctcagattgtgcatctactgatatccagctattcgaattcctctaacgaactcaagtcgaatataaatgatttcgatctgtattcggataatatcgacttacgtctgctaaaatacctaattgtggataaacggatacgtccgtccaagaatacgaattatgcaatcaatggtctcggattggtggatatatacgtaacgacgcctaatccgagaccagaagtattgctatggcttcttaaatcagaatgttacagcaccggttacgtatttcgtacctgtatgtacgacagtgatatgtgtaagaactctcttcattactatatatcgtctcatagagaatctcaatctctatccaaggatgtaattaaatgtttgatcgataacaatgtttccatccatggcagagacgaaggaggatctttacccatccaatactactggtcttgctcaaccatagatatagagattgttaaattattaataaaggatgtggacacgtgtagagtatacgacgtcagccctatattagaggcgtattatctaaacaagcgatttagagtaaccccatataatgtagacatggaaatcgttaatcttcttattgagagacgtcatactcttgtcgacgtaatgcgtagtattacttcgtacgattccagagaatataaccactacatcatcgataacattctaaagagatttagacaacaggatgtacaagccatgttgataaactacttacattacggcgatatggtaagtatacctatcattcaatgcatgttggataacggagcaaccatggataagacgacggacaacaactatcctctacacgactactttgttaataataatctcgtcgatgtaaacgtcgtaaggtttatcgtggaaaatatggacacgcggctgtaaatcacatatctaacaatggccgtctatgtatgtacggtctgatattatcgagatttaataattgcgggtatcactgttatgaaaccatactgatagatgtatttgatatactaagcaagtacatggatgatatagatatgatcgataactctactatattacgcggtcgatgtcaataatatacaatttgcaaagcggttattggaatatggagcgagtgtcacgctcgataatcaatacggccatccagaaaagcagttaccaaagagaaaacaaaacgaggatagttgatttattacttagctaccatcccactctagagactatgattgacgcatttaatagagatatacgctatctatatcctgaaccattattcgcctgtatcagatacgccttaatcctagatgatgattttccttctaaagtaaagtatgatatctccggtcgtcataaggaactaaagcgctatagagtagacattaatagaatgaagaatgtctacatatcaggcgtctccatgtttgatatattctttaaacgaagcaaacgccacaaattgagatacgcaaagaatccgacatcaaatggtacaaaaaagaactaacgtccatcattacagaaactgtaaagaacaatgagaggatcgactccatagtggacaacattaatacagacgataacttgatttcgaaattacccatggagatactttattactccattaaataatttatcatggagcgataatgtcctgtttcatttgtttccatgacatattacaaaatcgattccgtccaagatgataaaaacatttaccggcatcataaacacggagtttattttatatgtctcgcataaacattactaaaaaaatatattgttctgtttttctttcacatctttaattatgaaaaagtaaatcattatgagatggacgagattgtacgcatcgttcgcgacagtatgtggtacatacctaacgtatttatggacgacggtaagaatgaaggtcacgtttctgtcaacaatgtctgtcatatgtattttacgttctttgatgtggatacatcgtctcatctgtttaagctagttattaaacactgcgatctgaataaacgaggtaactctccattacattgctatacgatgaatacacgatttaatccatctgtattaaagatattgttacaccacggcatgcgtaactttgatagcaaggatgaccactatcaatcgataacaagatctttgatatactaacggacaccattgatgactttagtaaatcatccgatctattgctgtgttatcttagatataaattcaatgggagcttaaactattacgttctgtacaaaggatccgaccctaattgcgccgacgaggatgaactcacttctcttcattactactgtaaacacatatccacgttctacgaaagcaattattacaagttaagtcacactaagatgcgagccgagaagcgattcatctacgcgataatagattatggagcaaacattaacgcggttacacacttaccttcaacagtataccaaacatagtcctcgtgtggtgtatgctcttttatctcgaggagccgatacgaggatacgtaataatcttgattgtacacccatcatggaacgattgtgcaacaggtcatattctcataatgttactcaattggcacgaacaaaaggaagaaggacaacatctactttatctattcataaaacataatcaaggatacactctcaatatactacggtatctattagataggttcgacattcagaaagacgaatactataataccgcctttcaaaattgtaacaacaatgttgcctcatacatcggatacgacatcaaccttccgactaaagacggtattcgacttggtgtttgaaaacagaaacatcatatacaaggcggatgttgtgaatgacatcatccaccacagactgaaagtatctctacctatgattaaatcgttgttctacaagatgtctctccctacgacgattactacgtaaaaaagatactagcctactgcctattaagggacgagtcattcgcggaactacatagtaaattctgtttaaacgaggactataaaagtgtatttatgaaaaatatatcattcgataagatagattccatcatcgtgacataagtcgcctcaaagagattcgaatctccgacaccgacctgtatacggtatcacagctatcttaaagccatacattcagacagtcacatttcatttcccatgtacgacgatctcatagaacagtgccatctatcgatggagcgtaaaagtaaactcgtcgacaaagcactcaataaattagagtctaccatcggtcaatctagactatcgtatttgcctccggaaattatgcgcaatatcatctaaacagtatgttgtacggaaagaaccattacaaatattatccatgatagaaagaaaatatctatatgattggagaagtaggaaacaggaacaagacaacgattactacattattaaatcatgaagtccgtattatactcgtatatattgtttctctcatgtataataataaacggaagagatatagcaccgcatgcaccatccgatggaaagtgtaaagacaacgaatacaaacgccataatttgtgtccgggaacatacgcttccagattatgcgatagcaagactaacacacgatgtacgccgtgtggttcgggtaccttcacatctcgcaataatcatttacccgcttgtctaagttgtaacggaagacgcgatcgtgtaacacgactcacaatagaatctgtgaatgctctcccggatattattgtcttctcaaaggatcatccggatgcaaggcatgtgtttcccaaacaaaatgtggaataggatacggagtatccggagacgtcatctgttctccgtgtggtctcggaacatattctcacaccgtctcttccgcagataaatgcgaacccgtacccagaaatacgtttaactatatcgatgtggaaattaacctgtatccagttaacgacacgtcgtgtactcggacgaccactaccggtctcagcgaatccatctcaacgtcggaactaactattactatgaatcataaagactgtaatcccgtctttcgtgatggatacttctccgttcttaataaggtagcaacttcaggattctttacaggagaaaggtgtgcactctgaatttcgagattaaatgcaataacaaagattcttcctccaaacagttaacgaaagcaaagaatgatactatcatgccgcattcggagacagtaactctagtgggcgacatctatatactatatagtaataccaatactcaagactacgaaactgatacaatctcttatcatgtgggtaatgttctcgatgtcgatagccatatgcccggtagttgcgatatacataaactgatcactaattccaaacccacccactttttatagtaagtttttcacccataaataataaatacaataattaatttctcgtaaaagtagaaaatatattctaatttattgcacggtaaggaagtagaatcataaagaacagtactcaatcaatagcaattatgaaacaatatatcgtcctggcatgcatgtgcctggcggcagctgctatgcctgccagtcttcagcaatcatcctcatcctcctcctcgtgtacggaagaagaaaacaaacatcatatgggaatcgatgttattatcaaagtcacaaagcaagaccaaacaccgaccaatgataagatttgccaatccgtaacggaaattacagagtccgagtcagatccagatcccgaggtggaatcagaagatgattccacatcagtcgaggatgtagatcctcctaccacttattactccatcatcggtggaggtctgagaatgaactttggattcaccaaatgtcctcagattaaatccatctcagaatccgctgatggaaacacagtgaatgctagattgtccagcgtgtccccaggacaaggtaaggactctcccgcgatcactcatgaagaagctcttgctatgatcaaagactgtgaagtgtctatcgacatcagatgtagcgaagaagagaaagacagcgacatcaagacccatccagtactcgggtctaacatctctcataagaaagtgagttacgaagatatcatcggttcaacgatcgtcgatacaaaatgcgtcaagaatctagagtttagcgttcgtatcggagacatgtgcaaggaatcatctgaacttgaggtcaaggatggattcaagtatgtcgacggatcggcatctgaaggtgcaaccgatgatacttcactcatcgattcaacaaaactcaaagcgtgtgtctgaatcgataactctattcatctgaaattggatgagtagggttaatcgaacgattcaggcacaccacgaattaaaaaagtgtaccggacactatattccggtttgcaaaacaaaaatgttcttaactacattcacaaaaagttacctctcgcgacttcttctttttctgtctcaatagtgtgatacgattatgacactattcctattcctattcctatttcctttcagagtatcacaaaaatattaaacctctttctgatggtctcataaaaaaagttttacaaaaatatttttattctctttctctctttgatggtctcataaaaaaagttttacaaaaatatttttattctctttctctctttgatggtctcataaaaaaagttttacaaaaatatttttattctctttctctctttgatggtctcataaaaaaagttttacaaaaatatttttattctctttctctctttgatggtctcataaaaaaagttttacaaaaatatttttattctctttctctctttgatggtctcataaaaaaagttttacaaaaatatttttattctctttctctctttgatggtctcataaaaaaagttttacaaaaatatttttattctctttctctctttgatggtctcataaaaaaagttttacaaaaatatttttattctctttctctctttgatggtctcataaaaaaagttttacaaaaatatttttattctctttctctctttgatggtctcataaaaaaagttttacaaaaatatttttattctctttctctctttgatggtctcataaaaaaagttttacaaaaatatttttattctctttctctctttgatggtctcataaaaaaagttttacaaaaatatttttattctctttctctctttgatggtctcataaaaaaagttttacaaaaatatttttattctctttctctctttgatggtctcataaaaaaagttttacaaaaatatttttattctctttctctctttgatggtctcataaaaaaagttttacaaaaatatttttattctctttctctctttgatggtctcataaaaaaagttttacaaaaatatttttattctctttctctctttgatggtctcataaaaaaagttttacaaaaatatttttattctctttctctctttgatggtctcataaaaaaagttttacaaaaatatttttattctctttctctctttgatggtctcataaaaaaagttttaatcg

SEQ ID NO: 7 - DNA, 188082 bp, Artificial Sequence
  LIVP 6.1.1
tcaaagagagaaagagaataaaaatatttttgtaaaactttttttatgagaccatcaaagagagaaagagaataaaaatatttttgtaaaactttttttatgagaccatcaaagagagaaagagaataaaaatatttttgtaaaactttttttatgagaccatcaaagagagaaagagaataaaaatatttttgtaaaactttttttatgagaccatcaaagagagaaagagaataaaaatatttttgtaaaactttttttatgagaccatcaaagagagaaagagaataaaaatatttttgtaaaactttttttatgagaccatcaaagagagaaagagaataaaaatatttttgtaaaactttttttatgagaccatcaaagagagaaagagaataaaaatatttttgtaaaactttttttatgagaccatcaaagagagaaagagaataaaaatatttttgtaaaactttttttatgagaccatcaaagagagaaagagaataaaaatatttttgtaaaactttttttatgagaccatcaaagagagaaagagaataaaaatatttttgtaaaactttttttatgagaccatcaaagagagaaagagaataaaaatatttttgtaaaactttttttatgagaccatcagaaagaggtttaatatttttgtgatactctgaaaggaaataggaataggaataggaatagtgtcataatcgtatcacactattgagacagaaaaagaagaagtcgcgagaggtaactttttgtgaatgtagttaagaacatttttgttttgcaaaccggaatatagtgtccggtacacttttttaattcgtggtgtgcctgaatcgttcgattaaccctactcatccaatttcagatgaatagagttatcgattcagacacacgctttgagttttgttgaatcgatgagtgaagtatcatcggttgcaccttcagatgccgatccgtcgacatacttgaatccatccttgacctcaagttcagatgattccttgcacatgtctccgatacgaacgctaaactctagattcttgacgcattttgtatcgacgatcgttgaaccgatgatatcttcgtaactcactttcttatgagagatgttagacccgagtactggatgggtcttgatgtcgctgtctttctcttcttcgctacatctgatgtcgatagacacttcacagtctttgatcatagcaagagcttcttcatgagtgatcgcgggagagtccttaccttgtcctggggacacgctggacaatctagcattcactgtgtttccatcagcggattctgagatggatttaatctgaggacatttggtgaatccaaagttcattctcagacctccaccgatgatggagtaataagtggtaggaggatctacatcctcgactgatgtggaatcatcttctgattccacctcgggatctggatctgactcggactctgtaatttccgttacggattggcaaatcttatcattggtcggtgtttggtcttgctttgtgactttgataataacatcgattcccatatgatgtttgttttcttcttccgtacacgaggaggaggatgaggatgattgctgaagactggcaggcatagcagctgccgccaggcacatgcatgccaggacgatatattgtttcataattgctattgattgagtactgttctttatgattctacttccttaccgtgcaataaattagaatatattttctacttttacgagaaattaattattgtatttattatttatgggtgaaaaacttactataaaaagtgggtgggtttggaattagtgatcagtttatgtatatcgcaactaccgggcatatggctatcgacatcgagaacattacccacatgataagagattgtatcagtttcgtagtcttgagtattggtattactatatagtatatagatgtcgcccactagagttactgtctccgaatgcggcatgatagtatcattctttgctttcgttaactgtttggaggaagaatctttgttattgcatttaatctcgaaattcagagtgcacacctttctcctgtaaagaaacctgaagtcgctaccttattaagaacggagaagtatccatcacgaaagacgggattacagtctttatgattcatagtaatagttagttccgacgttgagatggattcgctgagaccggtagtggtcgtccgagtacacgacgtgtcgttaactggatacaggttaatttccacatcgatatagttaaacgtatttctgggtacgggttcgcatttatctgcggaagagacggtgtgagaatatgttccgagaccacacggagaacagatgacgtctccggatactccgtatcctattccacattttgtttgggaaacacatgccttgcatccggatgatcctttgagaagacaataatatccgggagagcattcacagattctattgtgagtcgtgttacacgatcgcgtcttccgttacaacttagacaagcgggtaaatgattattgcgagatgtgaaggtacccgaaccacacggcgtacattgtgtgttagtcttgctatcgcataatctggaagcgtatgttcccggacacaaattatggcgtttgtattcgttgtctttacactttccatcggatggtgcatgcggtgctatatctcttccgtttattattatacatgagagaaacaatatatacgagtataatacggacttcatgatttaataatgtagtaatcgttgtcttgttcctgtttcctacttctccaatcatatagatattttctttctatcatggataatatttgtaatggttctttccgtacaacatactgtttagatgatattgcgcataatttccggaggcaaatacgatagtctagattgaccgatggtagactctaatttattgagtgctttgtcgacgagtttacttttacgctccatcgatagatggcactgttctatgagatcgtcgtacatgggaaatgaaatgtgactgtctgaatgtatggctttaagatagctgtgataccgtatacaggtcggtgtcggagattcgaatctctttgaggcgacttatgtcacgatgatggaatctatcttatcgaatgatatatttttcataaatacacttttatagtcctcgtttaaacagaatttactatgtagttccgcgaatgactcgtcccttaataggcagtaggctagtatcttttttacgtagtaatcgtcgtagggagagacatcttgtagaacaacgatttaatcataggtagagatactttcagtctgtggtggatgatgtcattcacaacatccgccttgtatatgatgtttctgttttcaaacaccaagtcgaataccgtctttagtcggaaggttgatgtcgtatccgatgtatgaggcaacattgttgttacaattttgaaaggcggtattatagtattcgtctttctgaatgtcgaacctatctaatagataccgtagtatattgagagtgtatccttgattatgttttatgaatagataaagtagatgttgtccttcttccttttgttcgtgccaattgagtaacattatgagaatatgacctgttgcacaatcgttccatgatgggtgtacaatcaagattattacgtatcctcgtatcggctcctcgagataaaagagcatacaccacacgaggactatgtttggtatactgttgaaggtaagtgtgtaaccgcgttaatgtttgctccataatctattatcgcgtagatgaatcgcttctcggctcgcatcttagtgtgacttgacttgtaataattgctttcgtagaacgtggatatgtgtttacagtagtaatgaagagaagtgagttcatcctcgtcggcgcaattagggtcggatcctttgtacagaacgtaatagtttaagctcccattgaatttatatctaagataacacagcaatagatcggatgatttactaaagtcatcaatggtgtccgttagtatatcaaagatcttgttatcgattgatagtggtcatccttgctatcaaagttacgcatgccgtggtgtaacaatatctttaatacagatggattaaatcgtgtattcatcgtatagcaatgtaatggagagttacctcgtttattcagatcgcagtgtttaataactagcttaaacagatgagacgatgtatctacatcaaagaacgtaaaatacatatgacagacattgttgacagaaacgtgaccttcattcttaccgtcgtccataaatacgttaggtatgtaccacatactgtcgcgaacgatgcgtacaatctcgtccatctcataatgatttactttttcataattaaagatgtgaaagaaaaaccgaacaatatatttttttagtaatgtttatgcgagacatataaaataaactccgtgtttatgatgccggtaaatgtttttatcatcttggacggaatcgattttgtaatatgtcatggaaacaaatgaaacaggacattatcgctccatgataaattatttaatggagtaataaagtatctccatgggtaatttcgaaatcaagttatcgtctgtattaatgttgtccactatggagtcgatcctctcattgttctttacagtttctgtaatgatggacgttagttcttttttgtaccatttgatgtcggattctttgcgtatctcaatctgtggcgtttgcttcgtttaaataatatatcaaacatggaaacgcctgatatgtagacattcttcattctattaatgtctactctatagcgctttagttccttatgacgaccggcgatatcatactttactttagaaggaaaatcatcatctaggattaaggcgtatctgatacaggcgaataatggttcaggatatagatagcgtatatctctattaaatgcgtcaatcatagtctctagagtgggatggtaactcagtaataaatcaactagcttcgttttgttttctctttggtaactgcttttctggatggccgtattgattatcgagcgtgacactcgctccatattccaataaccgctttgcaaattgtatattattgacatcgaccgcgtaatatagtagagttatcgatcatatctatatcatccatgtacttgcttagtatatcaaatacatctatcagtatggtttcataacagtgatacccgcaattattaaatctcgataatatcagaccgtacatacatagacggccattgttcgatacgtgatttacagccgcgtgtccatattttccacgataaaccttacgacgtttacatcgacgagattattattaacaaagtagtcgtgtagaggatagttgttgtccgtcgtcttatccatggttgctccgttatccaacatgcatcgaacgaccatatcgccgtaatgtaagtagtttatcagtatggcttgtacatcctgttgtctaaatctctttagaatgttatcgatgatgtagtggttatattctctggaatcgtacgaagtaatactacgcattacgtcgacaagagtatgacgtctctcaataagaagattaacgatttccatgtctacattatatggggttactctaaatcgcttgtttagataatacgcctctaatatagggctgacgtcgtatactctacacgtgtccacatcctttattaataataatttaacaatctctatatctatggttgagaaagaccagtagtattggatgggtaaagatcctccttcgtctctgccatggatggaaacattgttatcgatcaaacatttaattacatccttggatagagattgagattctctatgagacgatatatagtaatgaagagagttcttacacatatcactgtcgtacatacaggtacgaaatacgtaaccggtgctgtaacattctgatttaagaagccatagcaatacttctggtctcggattaggcgtcgttacgtatatatccaccaatccgagaccattgattgcataattcgtattcttggacggacgtatccgtttatccacaattaggtattttagcagacgtaagtcgatattatccgaatacagatcgaaatcatttatattcgacttgagttcgttagaggaattcgaatagctggatatcagtagatgcacaatttgagatttgacgtatctatgcttactgtatactcctagcggagttaatccttcgttgtttctacaaagtctctcgactccgcgagagaacaatcttaatgtctgtatcgcatttattggagacgtaacaatgtagcgcattgtttcctcgtctatctatatgttttgataagttgtgacacgtttcaatttctagttttatttttttgtacgtcacatcttcatccagtagacgacatagaatagtgcactctctaccacaataatccatagctattctggtgctaattattcctatttcacgaaggcaatcattcctcataagatgataaaaagtgtagtgagagagcatgaaggagatttagtatttagcagtgcggatatgatccaagagggtgagatagtcgttctcgttcagaatctttcgcagcataagtagtatgtcgatatacttatcgttgaagactctttataaaagtctatttgtttatatttattgcggatagcagtatttccctataaaaagtatacgtcctgtggtgtctttaatcatgtacatgaatggatggtttatgtagaccttcgtacgatataccatcgaaaagttaatcgtaaatactcctgtaacggccgatgcttctgtatactcctcattaacatctataaacgtcgtatgtagaaatttttctacagtgatagtttcattacacatcttgctaaaatctgcataatatccgaatatattagtaagtcctaaattttctaaaatcggtaccagattatacggttctgtcatttccactttaaactttggcatatacaagtctatacttttagtagataacataccacaccattttttaaatttttcatctgttatatttttttctatgttatatataccttctatgtcgtccggtagtataattaccatactagagtttccctcgtatggaatatcgataatagagaatcctccgaataattcattaatatgtacatattgcaagttattctcggtacccaccatcatatcaacgctggtaactatattcttagaaatataaaacttgtctgtatatgtaagatgtttagaaaatggatatttccacattgctttaaaatggacggcgctaacaactgtcatacgagtattaatggatagcggactagtcaataaggaattaattttaccatttgtcattgtcttaacccattcgttgattagttcctttgtttggttagcattattaaagtttacagtttgaaaatcgtcttttattttttgtaggaaggaggcgtggaactcgatactatcgctaccgtatattttatttgcggtagctagtgtcgcacaatacggaatatctacctccatgtcatcattattgtcatcgggtgtattctcattcatattctctatatattttgatagttgttcagctgtagaaccagctgctccatgatttagaatagataaagtagataaaatggaaactggagaaatcaaaacattttcatcagggtgttttacgattagttctttaaagatatccatggtatagacctaacgataacgatatatatcataaataaataatgttaaatttcagtttatgtttgtaccccgtattcatacttaacaaattggtattgcgtacacaatcaatcatattacataccattaataatgcaagcataaaaaatcgttagtagatgtttctaaatataggttccgtaagcaaagaatataagaatgaagcggtaatgataaaatcaatcgttatctaaaatgatcatactcatttattttattctattatattaacacatacatttttaacagcaacacattcaatattgtattgttatttttatattatttacacaattaacaatatattattagtttatattactgaattaataatataaaattcccaatcttgtcataaacacacactgagaaacagcataaacacagaatccatcaaaaatgttgataaattatctgatgttgttgttcgctgctatgataatcagatcattcgccgatagtggtaacgctatcgaaacgacattgccagaaattacaaacgctacaacagatattccagctatcagattatgcggtccagagggagatggatattgtttacacggtgactgtatccacgctagagatattgacggtatgtattgtagatgctctcatggttatacaggcattagatgtcagcatgtagtattagtagactatcaacgttcagaaaacccaaacactacaacgtcatatatcccatctcccggtattatgcttgtattagtaggcattattatgtgttgtctattatctgtttataggttcactcgacgaactaaactacctatacaagatatggttgtgccataatttttataaatttttttatgagtatttttacaaaaatgtataaagtgtatgtcttatgtatatttataaaaatgctaagtatgcgatgtatctatgttatttgtatttatctaaacaatacctctacctctagatattatacaaaaattttttatttcggcatattaaagtaaaatctagttaccttgaaaatgaatacagtgggtggttccgtatcaccagtaagaacataatagtcaaatacagtatccgattgagattttgcatacaatactagtctagaaagaaatttgtaatcatcttctgtgacgggagtccatatatctgtatcatcgtctagtttatcagtgtcccatgctatattcctgttatcatcattagttaatgaaaataactctcgtgcttcagaaaagtcaaatattgtatccatacatacatctccaaaactatcgcttatacgtttatctttaacgatacctatacctagatggttatttactaacagacattttccagatctattgactataactcctatagtttccacatcaaccaagtaatgatcatctattgttatataacaataacataactcttttccatttttatcagtatgtatatctatatcaacgtcgtcgttgtagtgaatagtagtcattgatctattatatgaaacggatatgtctagaacggcaattgttttacgtccagttaacactttctttgatttaaagtctagagtctttgcaaacataatatccttatccgactttatatttcctgtagggtggtataattttattttgcctccacatatcggtgtttccaaatatattactagacaatattccatatagttattagttaagggtacccaattagaacacgtacgcttattatcatcatttggatcgtatttcataaaagttattgtgttatcgatgtcaacacattctacattttttaatcgtctatatagtatttttctgatattttctataatatcagaattgtcttccatcggaagttgtatactatcggaatcagttacatgtttaaataattctctgatgtcattccttatacaatcaaattcattattaaacagtttaatagtctgtagacctttatcgtcgtaaatatccattgtcttattagttacgcttatttttatgtgtttttacgttgctttattatattttataagaatgattgtttgacgaatcacgagaactattaagacacattattaggtatatattataaaaaagtttttgattacgatgttataagaggaaagaggacacattaacatcatacatcaattaactacattcttataacatcgtaatcaaaagaattgcaattttgatgtataacaactgtcaatgggttatggaattgtatattacatattatacggtatgttggtaacgacaaataccggtcggtaattgtctgccggtgtaatagaattatatatatctatctattacaccggccttgtatacataataataagttgtggtagtatgatctccatatttataatttaggactttgtattcagtatttttggaatcataaaaaataaaaaaaagttttactaatttaaaatttaaaaagtatttacatttttttcactgtttagtcgcggatatggaattcgatcctgccaaaatcaatacatcatctatagatcatgtaacaatattacaatacatagatgaaccaaatgatataagactaacagtatgcattatccgaaatattatatcaatatcacaaaaataaatacacatttggctaatcaatttcgggcttggaaaaaacgtatcgccggaagggactatatgactaacttatctagagatacaggaatacaacaatcaaaacttactgaaactatacgtaactgtcaaaaaaatagaaacatatatggtctatatatacactacaatttagttattaattggataaccgatgtgattatcaatcaatattaagagggttggtaaattggtacatagctaataatacctatacacccaataatacaacaaccatttctgagttggatatcatcaaaatactaaataaatacgaggacgtgtatagagtaagtaaagaaaaagaatgtggaatttgctatgaagttgtttactcaaaacgatagatactttggtttattggattcgtgtactcatatattttgcataacatgcatcaatatatggcataaaacacgaagagaaaccggtgcgtcggataattgtcctatatgccgtacccgttttagaaacataacaatgagcaagttctataagctagttaactaataaataaaaagtttaatttgttgacgacgtatgtcgttattttttctcgtataaaagattaatttgattctaatataatctttagtattggataaatatcaattcaaattaattccattagattatatcataaataaaaatagtagcacacaactacttcagcaaacattctttttataaatgccatctagcgtagcgaggacacaagtgaacctataattatcaaatttattagtatcagtcacatgaaggactttacgtagagtgacgattccactatctgtggtacgaacggtttcatcttctttgatgccatcacccagatgttctataaacttggtatcctcgtccgatctcatatcctttgccaaccaatacatgtagctaaaattaggcataaatttcacacatcctgaacaatgaaattctccagaagatgttacaatgtctagatttggacatttggtttcaaccgcgttaacatatgagtgaacacacccatacatgaaagcgatgagaaataggattctcatcttgccaaaatatcactagaaaaaatttatttatcagttttaaaggtataaaaaatacttattgttgctcgaatattttgtatttgatggtatacggaagattagaaatgtaggtattatcatcaactgattctatggttttatgtattctatcatgtttcactattgcgttggaaataatatcatatgcttccacatatattttattttgttttaactcataatactcacgtaattctggattattggcatatctatgaataattttagctccatgatcagtaaatattaatgagaacatagtattaccacctaccattatttttttcatctcattcaattcttaattgcaaagatctatataatcattatagcgttgacttatggactctggaatcttagacgatgtacagtcatctataatcatggcatatttaatacattgttttatagcatagtcgttatctacgatgttagatatttctctcaatgaatcaatcacacaatctaatgtaggtttatgacataatagcattttcagcagttcaatgtttttagattcgttgatggcaatggctatacatgtatatccgttatttgatctaatgttgacatctgaaccggattctagcagtaaagatactagagattgtttattatatctaacagccttgtgaagaagtgtttctcctcgtttgtcaatcatgttaatgtctttaagataaggtaggcaaatgtttatagtactaagaattgggcaagcataagacatgtcacaaagacccttttttgtatgtataagtgtaaaaattataacatccatagttggatttacataggtgtccaatcgggatctctccatcatcgagataattgatggcatctcccttccttttttagtagatatttcatcgtgtaagaatcaatattaatatttctaaagtatccgtgtatagcctctttatttaccacagctccatattccactagagggatatcgccgaatgtcatatactcaattagtatatgttggaggacatccgagttcattgttttcaatatcaaagagatggtttccttatcatttctccatagtggtacaatactacacattattccgtgcggctttccattttccaaaaacaatttgaccaaatctaaatctacatctttattgtatctataatcactatttagataatcagccataattcctcgagtgcaacatgttagatcgtctatatatgaataagcagtgttatctattcctttcattaacaatttaacgatgtctatatctatatgagatgacttaatataatattgaagagctgtacaatagtttttatctataaaagacggcttgattccgtgattaattagacatttaacaacttccggacgcacatatgctctcgtatccgactctgaatacagatgagagatgatatacagatgcaatacggtaccgcaatttcgtagttgataatcatcatacgcgtatcagtactcgtcctcataaagaacactgcagccattttctatgaacaaatcaataattttagaaacaggatcattgtcattacataattttctataactgaacgatggttttcacatttaacactcaagtcaaatccatgttctaccaacacctttatcaagtcaacgtctacatttttggatttcatatagctgaatatattaaagttatttatgttgctaaatccagtggcttctagtagagccatcgctatatccttattaactttaacatgtctactatttgtgtattcttctaatggggtaagctgtctccaatttttgcgtaatggattagtgccactgtctagtagtagtttgacgacctcgacattattacaatgctcattaaaaaggtatgcgtgtaaagcattattcttgaattggttcctggtatcattaggatctctgtctttcaacatctgtttaagttcatcaagagccacctcctcattttccaaatagtcaaacattttgactgaatgagctactgtgaactctatacacccacacaactaatgtcattaaatatcatgtcaaaaacttgtacaattattaataaaaataatttagtgtttaaattttaccagttccagattttacacctccgttaatacctccattaaccccactggacgatcctcctccccacattccaccgccaccagatgtataagttttagatcctttattactaccatcatgtccatggataaagacactccacatgccgccactaccccctttagaagacatattaataagacttaaggacaagtttaacaataaaattaatcacgagtaccctactaccaacctacactattatatgattatagtttctatttttacagtaccttgactaaagtttctagtcacaagagcaatactaccaacctacactattatatgattatagtttctatttttataggaacgcgtacgagaaaatcaaatgtctaatttctaacggtagtgttgataaacgattgttatccgcggatacctcctctatcatgtcgtctattttcttactttgttctattaacttattagcattatatattatttgattataaaacttatattgcttattagcccaatctgtaaatatcggattattaacatatcgtttctttgtaggtttatttaacatgtacatcactgtaagcatgtccttaccatttattttaatttgacgcatatccgcaatttctttttcgcagtcggttataaattctatatatgatggatacatgctacatgtgtacttataatcgactaatatgaagtacttgatacatattttcagtaacgatttattattaccacctatgaataagtacctgtgatcgtctaggtaatcaactgttttcttaatacattcgatggttggtaatttactcagaataatttccaatatcttaatatataattctgctatttctgggatatatttatctgccagtataacacaaatagtaatacatgtaaacccatattttgttattatattaatgtctgcgccattatctattaaccattctactaggctgacactatgcgactcaatacaatgataaagtatactacatccatgtttatctattttgtttatatcatcaatatacggcttacaaagttttagtatcgataacacatccaactcacgcatagagaaggtagggaataatggcataatatttattaggttatcatcattgtcattatctacaactaagtttccattttttaaaatatactcgacaactttaggatctctattgccaaatttttgaaaatatttatttatatgcttaaatctatataatgtagctccttcatcaatcatacatttaataacattgatgtatactgtatgataagatacatattctaacaatagatcttgtatagaatctgtatatcttttaagaattgtggatattaggatattattacataaactattacacaattctaaaatataaaacgtatcacggtcgaataatagttgatcaactatataattatcgattttgtgatttttcttcctaaactgtttacgtaaatagttagatagaatattcattagttcatgaccactatagttactatcgaataacgcgtcaaatatttcccgtttaatatcgcatttgtcaagataataatagagtgtggtatgttcacgataagtataataacgcatctctttttcgtgtgaaattaaatagtttattacgtccaaagatgtagcataaccatcttgtgacctagtaataatataataatagagaactgttttacccattctatcatcataatcagtggtgtagtcgtaatcgtaatcgtctaattcatcatcccaattataatattcaccagcacgtctaatctgttctattttgatcttgtatccatactgtatgttgctacatgtaggtattcctttatccaataatagtttaaacacatctacattgggatttgatgttgtagcgtatttttctacaatattaataccatttttgatactatttatttctatacctttcgaaattagtaatttcaataagtctatattgatgttatcagaacatagatattcgaatatatcaaaatcattgatatttttatagtcgactgacgacaataacaaaatcacaacatcgtttttgatattattatttttcttggtaacgtatgcctttaatggagtttcaccatcatactcatataatggatttgcaccactttctatcaatgattgtgcactgctggcatcgatgttaaatgttttacaactatcatagagtatcttatcgttaaccatgattggttgttgatgctatcgcattttttggtttctttcatttcagttatgtatggatttagcacgtttgggaagcatgagctcatatgatttcagtactgtagtgtcagtactattagtttcaataagatcaatctctagatctatagaatcaaaacacgataggtcagaagataatgaatatctgtaggcttcttgttgtactgtaacttctggttttgttagatggttgcatcgtgctttaacgtcaatggtacaaattttatcctcgctttgtgtatcatattcgtccctactataaaattgtatattcagattatcatgcgatgtgtatacgctaacggtatcaataaacggagcacaccatttagtcataaccgtaatccaaaaatttttaaagtatatcttaacgaaagaagttgtgtcattgtctacggtgtatggtactagatcctcataagtgtatatatctagagtaatgtttaatttattaaatggttgataatatggatcctcgtgacaatttccgaagatggaaataagacataaacacgcaataaatctaattgcggacatggttactccttaaaaaaatacgaataatcaccttggctatttagtaagtgtcatttaacactatactcatattaatccatggactcataatctctatacgggattaacggatgttctatatacggggatgagtagttctcttctttaactttatactttttactaatcatatttagactgatgtatgggtaatagtgtttgaagagctcgttctcatcatcagaataaatcaatatctctgtttttttgttatacagatgtattacagcctcatatattacgtaatagaacgtgtcatctaccttattaactttcaccgcatagttgtttgcaaatacggttaatcctttgacctcgtcgatttccgaccaatctgggcgtataatgaatctaaactttaattgcttgtaatcattcgaaataatttttagtttgcatccgtagttatcccctttatgtaactgtaaatttctcaacgcgatatctccattaataatgatgtcgaattcgtgctgtatacccatactgaatggatgaacgaataccgacggcgttaatagtaatttactttttcatctttacatattgggtactagttttactatcataagtttataaattccacaagctactatggaataagccaaccatcttagtataccacacatgtcttaaagtttattaattaattacatgttgttttatatatatcgctacgaatttaaagagaaattagtttaggaagaaaaattatctatctacatcatcacgtctctgtattctacgatagagtgctactttaagatgcgacagatccgtgtcatcaaatatatactccattaaaatgattattccggcagcgaacttgatattggatatatcacaacctttgttaatatctacgacaatagacagcagtcccatggttccataaacagtgagtttatctttctttgaagagatattttgtagagatcttataaaactgtcgaatgacatcgcatttatatctttagctaaatcgtatatgttaccatcgtaatatctaaccgcgtctatcttaaacgtttccatcgctttaaagacgtttccgatagatggtctcatttcatcagtcatactgagccaacaaatataatcgtgtataacatctttgatagaatcagactctaaagaaaacgaatcggctttattatacgcattcatgataaacttaatgaaaaatgtttttcgttgtttaagttggatgaatagtatgtcttaataattgttattatttcattaattaatatttagtaacgagtacactctataaaaacgagaatgacataactaatcataactagttatcaaagtgtctaggacgcgtaattttcatatggtatagatcctgtaagcattgtctgtattctggagctattttctctatcgcattagtgagttcagaatatgttataaatttaaatcgaataacgaacataactttagtaaagtcgtctatattaactcttttattttctagccatcgtaataccatgtttaagatagtatattctctagttactacgatctcatcgttgtctagaatatcacatactgaatctacatccaattttagaaattggtctgtgttacatatctcttctatattattgttgatgtattgtcgtagaaaactattacgtagaccattttctttataaaacgaatatatagtactccaattatctttaccgatatatttgcacacataatccattctctcaatcactacatctttaagattttcgttgttaagatatttggctaaactatataattctattagatcatcaacagaatcagtatatatttttctagatccaaagacgaactctttggcgtcctctataatattcccagaaaagatattttcgtgttttagtttatcgagatctgatctgttcatatacgccatgattgtacggtacgttatgataaccgcataaaataaaaatccattttcatttttaaccaatactattcataattgagattgatgtaatactttgttactttgaacgtaaagacagtacacggatccgtatctccaacaagcacgtagtaatcaaatttggtgttgttaaacttcgcaatattcatcaatttagatagaaacttatactcatcatctgttttaggaatccatgtattattaccactttccaacttatcattatcccaggctatgtttcgtccatcatcgttgcgcagagtgaataattcttttgtattcggtagttcaaatatatgatccatgcatagatcggcaaagctattgtagatgtgatttttcctaaatctaatataaaactcgtttactagcaaacactttcctgatttatcgaccaagacacatatggtttctaaatctatcaagtggtggggatccatagttatgacgcagtaacatatattattacattcttgactgtcgctaatatctaaatatttattgttatcgtattggattctgcatatagatggcttgtatgtcaaagatatagaacacataaccaatttatagtcgcgctttacattctcgaatctaaagttaagagatttagaaaacattatatcctcggatgatgttatcactgtttctggagtaggatatattaaagtctttacagatttcgtccgattcaaataaatcactaaataatatcccacattatcatctgttagagtagtatcattaaatctattatattttatgaaagatatatcactgctcacctctatatttcgtacatttttaaactgtttgtataatatctctctgatacaatcagatatatctattgtgtcggtagacgataccgttacatttgaattaatggtgttccattttacaacttttaacaagttgaccaattcatttctaatagtatcaaactctccatgattaaatattttaatagtatccattttatatcactacggacacaaagtagctgacataaaccattgtataatttttatgttttatgtttattagcgtacacattttggaagttccggcttccatgtatttcctggagagcaagtagatgatgaggaaccagatagtttatatccgtacttgcacttaaagtctacattgtcgttgtatgagtatgatcttttaaacccgctagacaagtatccgtttgatattgtaggatgtggacatttaacaatctgacacgtgggtggatcggaccattctcctcctgaacacaggacactagagttaccaatcaacgaatatccactattgcaactataagttacaacgctcccatcggtataaaaatcctcgtatccgttatgtcttccgttggatatagatggaggggattggcatttaacagattcacaaataggtgcctcgggattccataccatagatccagtagatcctaattcacaatacgatttagattcaccgatcaactgatatccgctattacaagagtacgttatactagagccaaagtctactccaccaatatcaagttggccattatcgatatctcgaggcgatgggcatctccgtttaatacattgattaaagagtgtccatccagtacctgtacatttagcatatataggtcccattttttgctttctgtatccaggtagacatagatattctatagtgtctcctatgttgtaattagcattagcatcagtctccacactattcttaaatttcatattaatgggtcgtgacggaatagtacagcatgatagaacgcatcctattcccaacaatgtcaggaacgtcacgctctccaccttcatatttatttatccgtaaaaatgttatcctggacatcgtacaaataataaaaagcccatatatgttcgctattgtagaaattgtttttcacagttgctcaaaaacgatggcagtgacttatgagttacgttacactttggagtctcatctttagtaaacatatcataatattcgatattacgagttgacatatcgaacaaattccaagtatttgattttggataatattcgtattttgcatctgctataattaagatataatcaccgcaagaacacacgaacatctttcctacatggttaaagtacatgtacaattctatccatttgtcttccttaactatatatttgtatagataattacgagtctcgtgagtaattccagtaattacatagatgtcgccgtcgtactctacagcataaactatactatgatgtctaggcatgggagacttttttatccaacgatttttagtgaaacattccacatcgtttaatactacatatttttcatacgtggtataaactccacccattacatatatatcatcgtttacgaataccgacgcgcctgaatatctaggagtaattaagtttggaagtcttatccatttcgaagtgccgtgtttcaaatattctgccacacccgttgaaatagaaaattctaatcctcctattacatataactttccatcgttaacacaagtactaacttctgattttaacgacgacatattagtaaccgttttccattttttcgttttaagatctacccgcgatacggaataaacatgtctattgttaatcatgccgccaataatgtatagacaattatgtaaaacatttgcattatagaattgtctatctgtattaccgactatcgtccaatattctgttctaggagagtaatgggttattgtggatatataatcagagtttttaatgactactatattatgttttataccatttcgtgtcactggctttgtagatttggatatagttaatcccaacaatgatatagcattgcgcatagtattagtcataaacttgggatgtaaaatgttgatgatatctacatcgtttggatttttatgtatccactttaataatatcatagctgtaacatcctcatgatttacgttaacgtcttcgtgggataagatagttgtcagttcatcctttgataattttccaaattctggatcggatgtcaccgcagtaatattgttgattatttctgacatcgacgcattatatagttttttaattccatatcttttagaaaagttaaacatccttatacaatttgtgaaattaatattatgaatcatagtttttacacatagatctactacaggcggaacatcaattattatggcagcaactagtatcatttctacattgtttatggtgatgtttatcttcttccagcgcatatagtctaatagcgattcaaacgcgtgatagtttataccattcaatataatcgcttcatcctttagatggtgatcctgaatgcgtttaaaaaaattatacggagacgccgtaataatttccttattcacttgtataatttccccattgatagaaaatatcacgctttccattcttaaagtactataagtaattatagtataatgtaaacgtttatatattcaatatttttataaaaatcattttgacattaattcctttttaaatttccgtctatcatctatagaaacgtattctatgaatttataaaatgcttttacgtgtcctatcgtaggcgatagaaccgctaaaaagcctatcgaatttctacaaaagaatctgttatatggtatagggagagtataaaacattaaatgtccgtacttattaaagtattcagtagccaatcctaactctttcgaatacttattaatggctcttgttctgtacgaatctatttttttgaacaacggacctagtggtatatcttgttctatgtatctaaaataatgtctgactagatccgttagtttaatatccgcagtcatcttgtctagaatggcaaatctaactgcgggtttaggctttagtttagtttctatatctacatctatgtctttatctaacaccaaaaatataatagctaatattttattacaatcatccggatattcttctacgatctcactaactaatgtttctttggttatactagtatagtcactatcggacaaataaagaaaatcagatgatcgatgaataatacatttaaattcatcatctgtaagatttttgagatgtctcattagaatattattagggttagtactcattatcattcggcagctattacttattttattatttttcaccatatagatcaatcattagatcatcaaaatatgtttcaatcatcctaaagagtatggtaaatgactcttcccatctaatttctgaacgttcaccaatgtctctagccactttggcactaatagcgatcattcgcttagcgtcttctatattattaactggttgattcaatctatctagcaatggaccgtcggacagcgtcattctcatgttcttaatcaatgtacatacatcgccgtcatctaccaattcatccaacaacataagctttttaaaatcatcattataataggtttgatcgttgtcatttctccaaagaatatatctaataagtagagtcctcatgcttagttaacaactattttttatgttaaatcaattagtacaccgctatgtttaatacttattcatattttagtttttaggattgagaatcaatacaaaaattaatgcatcattaattttagaaatacttagtttccacgtagtcaatgaaacatttgaactcatcgtacaggacgttctcgtacaggacgtaactataaaccggtttatatttgttcaagatagatacaaatccgataactttttttacgaattctacgggatccactttaaaagtgtcataccgggttctttttatttttttaaacagatcaatggtgtgatgttgattaggtcttttacgaatttgatatagaatagcgtttacatatcctccataatggtcaatcgccatttgttcgtatgtcataaattctttaattatatgacactgtgtattatttagttcatccttgttcattgttaggaatctatccaaaatggcaattatactagaactataggtgcgttgtatacacatattgatgtgtctgtttatacaatcaatgctactaccttcgggtaaaattgtagcatcatataccatttctagtactttaggttcattattatccattgcagaggacgtcatgatcgaatcataaaaaaatatattatttttatgttattttgttaaaaataatcatcgaatacttcgtaagatactccttcatgaacataatcagttacaaaacgtttatatgaagtaaagtatctacgatttttacaaaagtccggatgcataagtacaaagtacgcgataaacggaataataatagatttatctagtctatctttttctatagctttcatagttagatacatggtctcagaagtaggattatgtaacatcagcttcgataaaatgactgggttatttagtcttacacattcgctcatacatgtatgaccgttaactacagagtctacactaaaatgattgaacaatagatagtctaccattgtttcgtattcagatagtacagcgtagtacatggcatcttcacaaattatatcattgtctaatagatatttgacgcatcttatggatcccacttcaacagccatcttaaaatcggtagaatcatattgctttcctttatcattaataatttctagaacatcatctctatcataaaagatacaaatattaactgtttgatccgtaataacattgctagtcgatagcaatttgttaataagatgcgctgggctcaatgtcttaataagaagtgtaagaggactatctccgaatttgttttgtttattaacatccgttgatggaagtaaaagatctataatgtctacattcttgactgttttagagcatacaatatggagaggtgtatttccatcatgatctggttttgagggactaattcctagtttcatcatccatgagattgtagaagcttttggattgtctgacataagatgtctatgaatatgatttttgccaaatttatccactatcctggcttcgaatccgatggacattatttttttaaacactctttctgaaggatctgtacacgccaacaacggaccacatccttcttcatcaaccgagttgttaatcttggctccatactgtaccaataaatttattctctctatgacttcatcatctgttcccgagagataatatagaggcgttttatgctgtttatcacacgcgtttggatctgcgccgtgcgtcagcagcatcgcgactattctattattattaattttagaagctatatgcaatggataatttccatcatcatccgtctcatttggagagtatcctctatgaagaagttcttcgacaaatcgttcatctagtcctttaattccacaatacgcatgtagaatgtgataattatttccagaaggttcgatagcttgtagcatattcctaaatacatctaaatttttactattatatttggcataaagagatagataatactcggccgacataatgttgtccattgtagtataaaaattaatatttctatttctgtatatttgcaacaatttactctctataacaaatatcataacttagttcttttatgtcaagaaggcactggtttagttcatctataaatgtcacgccataactaccacgcatgccatactcagaattatgataaagatatttatccttggggtgtaggtaatggggattaatctttgttggatcagtctctaagttaacacatgtcacacatgatccatttatagttatatcacacgatgatgatttatgaattgattccggaagatcgctatcgtattttgtggttccacaattcatttccatacatgttattgtcacactaatattatgatgaactttatctagccgctgagtggtaaacaacagaacagatagtttattatctttaccaacaccctcagccgctgccacaaatctctgatccgtatccatgatggtcatgtttatttctagtccgtatccagtcaacactatgttagcatttctgtcgatatagctttcactcatatgacactcaccaataatagtagaattaatgtcgtaatttacaccaatagtgagttcggcggcaaagtaccaataccggtaatcttgtcgaggaggacatatagtattcttgtattctaccgaatacccgagagatgcgatacaaaagagcaagactaatttgtaaaccatcttactcaaaatatgtaacaatagtacgatgcaatgagtaagacaataggaaatctatcttatatacacataattattctatcaattttaccaattagttagtgtaatgttaacaaaaatgtgggagaatctaattagtttttctttacacaattgacgtacatgagtctgagttccttgtttttgctaattatttcatccaatttattattcttgacgatatcgagatcttttgtataggagtcaaacttgtattcaacatgcttttctataatcattttagctatttcggcatcatccaatagtacattttccagattagcagaatagatattaatgtcgtatttgaacagagcctgtaacatctcaatgtctttattatctatagccaatttaatgtccggaatgaagagaagggaattattggtgtttgtcgacgtcatatagtcgagcaagagaatcatcatatccacgtgtccattttttatagtgatgtgaatacaactaaggagaatagccagatcaaaagtagatggtatctctgaaagaaagtaggaaacaatacttacatcattaagcatgacggcatgataaaatgaagttttccatccagttttcccatagaacatcagtctccaatttttcttaacaaacagttttaccgtttgcatgttaccactatcaaccgcataatacaatgcggtgtttcccttgtcatcaaattgtgaatcatccagtccactgaatagcaaaatctttactattttggtatcttccaatgtggctgcctgatgtaatggaaattcattctctagaagatttttcaatgctccagcgttcaacaacgtacatactagacgcacgttattatcagctattgcataatacaaggcactatgtccatggacatccgccttaaatgtatctttactagagagaaagcttttcagctgcttagacttccaagtattaattcgtgacagatccatgtctgaaacgagacgctaattagtgtatattttttcattttttataattttgtcatattgcaccagaattaataatatctttaatagatctgattagtagatacatggctatcgcaaaacaacatatacacatttaataaaaataatatttattaagaaaattcagatttcacgtacccatcaatataaataaaataatgattccttacaccgtacccatattaaggagattccaccttacccataaacaatataaatccagtaatatcatgtctgatgatgaacacaaatggtgtattaaattccagtttttcaggagatgatctcgccgtagctaccataatagtagatgcctctgctacagttccttgttcgtcgacatctatctttgcattctgaaacattttataaatatataatgggtccctagtcatatgtttaaacgacgcattatctggattaaacatactaggagccatcatttcggctatcgacttaatatccctcttattttcgatagaaaatttagggagtttaagattgtacactttattccctaattgagacgaccaatagtctaattttgcagccgtgatagaatctgtgaaatgggtcatattatcacctattgccaggtacatactaatattagcatccttatacggaaggcgtaccatgtcatattctttgtcatcgattgtgattgtatttccttgcaatttagtaactacgttcatcatgggaaccgttttcgtaccgtacttattagtaaaactagcattgcgtgttttagtgatatcaaacggatattgccatatacctttaaaatatatagtattaatgattgcccatagagtattattgtcgagcatattagaatctactacattagacataccggatctacgttctactatagaattaattttattaaccgcatctcgtctaaagtttaatctatataggccgaatctatgatattgttgataatacgacggtttaatgcacacagtattatctacgaaactttgataagttagatcagtgtacgtatatttagatgttttcagcttagctaatcctgatattaattctgtaaatgctggacccagatctctttttctcaaatccatagtcttcaataattctattctagtattacctgatgcaggcaatagcgacataaacatagaaaacgaataaccaaacggtgagaagacaatattatcatcttgaatatttttatacgctactataccggcattggtaaatccttgtagacgataggcggacgctgaacacgctaacgatagtatcaataacgcaatcatgattttatggtattaataattaaccttatttttatgttcggtataaaaaaattattgatgtctacacatccttttgtaattgacatctatatatccttttgtataatcaactctaatcactttaacttttacagttttccctaccagtttatccctatattcaacatatctatccatatgcatcttaacactctctgccaagatagcttcagagtgaggatagtcaaaaagataaatatatagagcataatcattctcgtatactctgccctttattacatcacccgcattgggcaacgaataacaaaatgcaagcatcttgttaacgggctcgtaaattgggataaaaattatgtttttattgtcttatatctattttattcaagagaatattcaggaatttctttttccggttgtatctcgtcgcagtatatatcatttgtacattgtttcatattttttaatagtttacaccttttagtaggactagtatcgtacaattcatagctgtattttgaattccaatcacgcataaaaatatcttccaattgttgacgaagacctaatccatcatccggtgtaatattaatagatgctccacatgtatccgtaaagtaatttcctgtccaatttgaggtacctatataggccgttttatcggttaccatatatttggcatggtttaccctagaatacggaatgggaggatcagcatctggtacaataaatagctttacttctatatttatgtttttagattttagcatagcgatagatcttaaaaagtttctcatgataaacgaagatcgttgccagcaactaatcaatagcttaacggatacttgtctgtctatagcggatcttcttaattcatcttctatataaggccaaaacaaaattttacccgccttcgaataaataatagggataaagttcataacagatacataaacgaatttactcgcatttctaatacatgacaataaagcggttaaatcattggttctttccatagtacatagttgttgcggtgcagaagcaataaatacagagtgtggaacgccgcttacgttaatactaagaggatgatctgtattataatacgacggataaaagtttttccaattatatggtagattgttaactccaagataccagtatacctcaaaaatttgagtgagatccgctgccaagttcctattattgaagatcgcaatacccaattccttgacctgagttagtgatctccaatccatgttagcgcttcctaaataaatatgtgtattatcagatatccaaaattttgtatgaagaactcctcctaggatatttgtaatatctatgtatcgtacttcaactccggccatttgtagtctttcaacatcctttaatggtttgttagatttattaacggctactctaactcgtactcctcttttgggtaattgtacaatctcgtttaatattatcgtgccgaaattcgtacccacttcatccgataaactccaataaaaagatgatatatctagtgtttttgtggtattggatagaatttccctccacatgttaaatgtagacaaatatactttatcaaattgcatacctataggaatagtttctgtaatcactgcgattgtattatccggattcattttatttgttaaaagaataatcctatatcacttcactctattaaaaatccaagtttctatttctttcatgactgattttttaacttcatccgtttccttatgaagatgatgtttggcaccttcataaatttttatttctctattacaatttgcatgttgcatgaaataatatgcacctaaaacatcgctaatcttattgtttgttccctggagtatgagagtcgggggggtgttaatcttggaaattatttttctaaccttgttggtagccttcaagacctgactagcaaatccagccttaattttttcatgattgactaatgggtcgtattggtatttataaactttatccatatctctagatactgattctggacatagctttccgactggcgcatttggtgtgatggttcccataagtttggcagctagcagattcagtcttgaaacagcatctgcattaactagaggagacattagaatcattgctgtaaacaagtttggattatcgtaagaggctagctcccatggaatgacccaataagtagatttaatagttaccacgtgctgtaccaaagtcatcaatcatcattttttcaccattacttcttccatgtccaatatgatcatgtgagaatactaaaattcctaacgatgatatgttttcagctagttcgtcataacgtccagaatgtttaccagctccatgacttatgaatactaatgccttaggatatgtaataggtttccaatatttacaatatatgtaatcattgtccagattgaacatacagtttgcactcatgattcacgttatataactatcaatattaacagttcgtttgatgatcatattatttttatgttttattgataattgtaaaaacatacaattaaatcaatatagaggaaggagacggctactgtcttttgtaagatagtcatggcgactaaattagattatgaggatgctgttttttactttgtggatgatgataaaatatgtagtcgcgactccatcatcgatctaatagatgaatatattacgtggagaaatcatgttatagtgtttaacaaagatattaccagttgtggaagactgtacaaggaattgatgaagttcgatgatgtcgctatacggtactatggtattgataaaattaatgagattgtcgaagctatgagcgaaggagaccactacatcaattttacaaaagtccatgatcaggaaagtttattcgctaccataggaatatgtgctaaaatcactgaacattggggatacaaaaagatttcagaatctagattccaatcattgggaaacattacagatttgatgaccgacgataatataaacatcttgatactttttctagaaaaaaaattgaattgatgatataggggtcttcataacgcataattattacgttagcattctatatccgtgttaaaaaaaattatcctatcatgtatttgagagttttatatgtagcaaacatgatagctgtgatgccaataagctttagatattcacgcgtgctagtgttagggatggtattatctggtggtgaaatgtccgttatataatctacaaaacaatcatcgcatatagtatgcgatagtagagtaaacatttttatagtttttactggattcatacatcgtctacccaattcggttataaatgaaattgtcgccaatcttacacccaaccccttgttatccattagcatagtattaacttcgttatttatgtcataaactgtaaatgattttgtagatgccatatcatacatgatattcatgtccctattataatcattactaactttatcacaatatatgttgataatatctatatatgatctagtctttgtgggcaactgtctatacaagtcgtctaaacgttgtttactcatatagtatcgaacagccatcattacatggtcccgttccgttgatagataatcgagtatgttagtggacttgtcaaatctatataccatattttctggaagtggatatacatagtcgtgatcaacattattgctagcctcatcttctatatcctgtactataccattatctatatcatctacataatctatgatattattacacataaacatcgacaacatactattgtttattatctaagtcctgttgatccaaacccttgatctcctctatttgtactatctagagattgtacttcttccagttctggataatatatacgttgatagattagctgagctattctatctccagtatttacattaaacgtacattttccattattaataagaatgactcctatgtttcccctataatcttcgtctattacaccacctcctatatcaatgccttttagtgacagaccagacctaggagctattctaccatagcagaacttaggcatggacatactaatatctgtcttaattaactgtctttctcctggagggatagtataatcgtaagcgctatacaaatcatatccggcagcacccggcgattgcctagtaggagatttagctctgttagtttccttaacaaatctaactggtgagttaatattcatgttgaacataaaactaatattttatttcaaaattatttaccatcccatatattccatgaataagtgtgatgattgtacacttctatagtatctatatacgatccacgataaaatcctcctatcaatagcagtttattatccactatgatcaattctggattatccctcggataaataggatcatctatcagagtccatgtattgctggattcacaataaaattccgcatttctaccaaccaagaataaccttctaccgaacactaacgcgcatgatttataatgaggataataagtggatggtccaaactgccactgatcatgattgggtagcaaatattctgtagttgtatcagtttcagaatgtcctcccattacgtatataacattgtttatggatgccactgctggattacatctaggtttcagaagactcggcatattaacccaagcagcatccccgtggaaccaacgctcaacagatgtgggatttggtagacctcctactacgtataatttattgttagcgggtatcccgctagcatacagtctggggctattcatcggaggaattggaatccaattgtttgatatataatttaccgctatagcattgttatgtatttcattgttcatccatccaccgatgagatatactacttctccaacatgagtacttgtacacatatggaatatatctataatttgatccatgttcataggatactctatgaatggatacttgtatgatttgcgtggttgtttatcacaatgaaatattttggtacagtctagtatccattttacattatttatacctctgggagaaagataatttgacctgattacatttttgataaggagtagcagatttcctaatttatttcttcgctttatataccacttaatgacaaaatcaactacataatcctcatctggaacatttagttcatcgctttctagaataagtttcatagatagataatcaaaattgtctatgatgtcatcttccagttccaaaaagtgtttggcaataaagtttttagtatgacataagagattggatagtccgtattctatacccatcatgtaacactcgacacaatattcctttctaaaatctcgtaagataaagtttatacaagtgtagatgataaattctacagaggttaatatagaagcacgtaataaattgacgacgttatgactatctatatatacctttccagtatacgagtaaataactatagaagttaaactgtgaatgtcaaggtctagacaaaccctcgtaactggatctttatttttcgtgtatttttgacgtaaatgtgtgcgaaagtaaggagataactttttcaatatcgtagaattgactattatattgcctcctatggcatcaataattgttttgaatttcttagtcatagacaatgctaatatattcttacagtacacagtattgacaaatatcggcatttatgtttctttaaaagtcaacatctagagaaaaatgattatctttttgagacataactcccattttttggtattcacccacacgtttttcgaaaaaattagtttttccttccaatgatatattttccatgaaatcaaacggattggtaacattataaatttttttaaatcccaattcagaaatcaatctatccgcgacgaattctatatatgttttcatcatttcacaattcattcctataagtttaactggaagagccgcagtaagaaattcttgttcaatggatactgcatctgttataatagatctaacggtttcttcactcggtggatgcaataaatgtttaaacatcaaacatgcgaaatcgcagtgcagaccctcgtctctactaattagttcgttggaaaacgtgagtccgggcattaggccacgctttttaagccaaaatatggaagcgaatgatccggaaaagaagattccttctactgcagcaaaggcaataagtctctctccataaccggcgctgtcatgtatccacttttgagcccaatcggccttcttttttacacaaggcatcgtttctatggcattaaagagatagtttttttcattactatctttaacataagtatcgatcaaaagactatacatttccgaatgaatgttttcaatggccatctgaaatccgtagaaacatctagcctcggtaatctgtacttctgtacaaaatcgttccgccaaattttcattcactattccgtcactggctgcaaaaaacgccaatacatgttttataaaatatttttcgtctggtgttagtttattccaatcattgatatctttagatatatctacttcttccactgtccaaaatgatgcctctgcctttttatacatgttccagatgtcatgatattggattgggaaaataacaaatctatttggatttggtgcaaggatgggttccataactaaattaacaataacaataaattttttttcagttatctatatgcctgtacttggattttttgtacatcgatatcgccgcaatcactacaataattacaagtattattgatagcattgttattagtactatcataattaaattatctacattcatgggtgctgaataatcgttattatcatcattatcattttgtaattgtgacatcatactagataaatcgtttgcgagattgttgtgggaagcgggcatggaggatgcattatcattattatttaacgccttccatttggattcacaaatgttacgcacattcaacattttatggaaactataattttgtgaaaacaaataacaagaaaactcgtcatcgttcaaatttttaacgatagtaaaccgattaaacgtcgagctaatttctaacgctagcgactctgttggatatgggtttccagatatatatcttttcagttcccctacgtatctataatcatctgtaggaaatggaagatatttccatttatctactgttcctaatatcatatgtggtggtgtagtagaaccattaagcgcgaaagatgttatttcgcatcgtattttaacttcgcaataatttctggttagataacgcactctaccagtcaagtcaatgatattagcctttacagatatattcatagtagtcgtaacgatgactccatcttttagatgcgatactcctttgtatgtaccagaatcttcgtacctcaaactcgatatatttaaacaagttaatgagatattaacgcgttttatgaatgatgatatataaccagaagttttatcctcggtggctagcgctataaccttatcattataataccaactagtgtgattaatatgtgacacgtcagtgtgggtacaaatatgtacattatcgtctacgtcgtattcgatacatccgcatacagccaacaaatataaaatgacaaatactctaacgccgttcgtacccatcttgatgcggtttaataaatgttttgatttcaatttattgtaaaaaaagattcggttttatactgttcgatattctcattgcttatattttcatctatcatctccacacagtcaaatccgtggttagcatgcacctcatcaaccggtaaaagactatcggactcttctatcattataactctagaatatttaatttggtcattattaatcaagtcaattatcttatttttaacaaacgtgagtattttactcattttttataaaaacttttagaaatatacagactctatcgtgtgtctatatcttctttttatatccaatgtatttatgtctgatttttcttcatttatcatatataatggtccaaattctacacgtgcttcggattcatccagatcattaaggttcttataattgtaacatccttctcttccctcttctacatcttccttcttattcttattcttagcgtcacagaatctaccacagcaggatcccatgacgagcgtcatattaaactaatccattttcaattataatatatgattagtaatgaccattaaaataaaaaatattcttcataaccggcaagaaagtgaaaagttcacattgaaactatgtcagtagtatacatcatgaaatgatgatatatatatactctattttggtggaggattatatgatataattcgtggataatcatttttaagacacatttctttattcgtaaatcttttcacgttaaatgagtgtccatattttgcaatttcttcatatgatggcggtgtacgtggacgaggctgctcctgttcttgttgtggtcgccgactgtcgtgtctgcgtttagatccctccattatcgcgattgcgtagatggagtactattttataccttgtaattaaatttttttattaattaaacgtataaaaacgttccgtatctgtatttaagagccagatttcgtctaatagaacaaatagctacagtaaaaataactagaataattgctacacccactagaaaccacggatcgtaatacggcaatcggttttcgataataggtggaacgtatattttatttaaggacttaacaattgtctgtaaaccacaatttgcttccgcggatcctgtattaactatctgtaaaagcatatgttgaccgggcggagccgaacattctccgatatctaatttctgtatatctataatattattaacctccgcatacgcattacagttcttttctagcttggataccgcactaggtacatcgtctagatctattcctatttcctcagcgatagctcttctatccttttccggaagcaatgaaatcacttcaataaatgattcaaccatgagtgtgaaactaagtcgagaattactcatgcatttgttagttattcggagcgcgcaatttttaaactgtcctataacctctcctatatgaatagcacaagtgacattagtagggatagaatgttgagctaatttttgtaaataactatctataaaaagattatacaaagttttaaactctttagtttccgccatttatccagtctgagaaaatgtctctcataataaatttttccaagaaactaattgggtgaagaatggaaacctttaatctatatttatcacagtctgttttggtacacatgatgaattcttccaatgccgtactaaattcgatatctttttcgatttctggatatgtttttaataaagtatgaacaaagaaatggaaatcgtaataccagttatgtttaactttgaaattgttttttattttcttgttaatgattccagccacttgggaaaagtcaaagtcgtttaatgccgatttaatacgttcattaaaaacaaactttttatcctttagatgaattattattggttcattggaatcaaaaagtaagatattatcgggtttaagatctgcgtgtaaaaagttgtcgcaacagggtagttcgtagattttaatgtataacagagccatctgtaaaaagataaactttatgtattgtaccaaagatttaaatcctaatttgatagctaactcggtatctactttatctgccgaatacagtgctaggggaaaaattataatgtttcctctttcatattcgtagttagttctcttttcatgttcgaaaaagtgaaacatgcggttaaaatagtttataacattaatattactgttaataactgccggataaaagtgggatagtaatttcacgaatttgatactgtcctttctctcgttaaacgcctttaaaaaaactttagaagaatatctcaatgagagttcctgaccatccatagtttgtatcaataatagcaacatatgaagaacacgtttatacagagtatgtaaaaatgttaatttatagtttaatcccatggcccacgcacacacgattaattttttttcatctccctttagattgttgtatagaaatttgggtactgtgaactccgccgtagtttccatgggactatataattttgtggcctcgaatacaaattttactacatagttatctatcttaaagactataccatatcctcctgtagatatgtgataaaaatcgtcgtttataggataaaatcgtttatccttttgttggaaaaaggatgaattaatgtaatcattctcttctatctttagtagtgtttccttattaaaattcttaaaataatttaacaatctaactgacggagcccaattttggtgtaaatctaattgggacattatattgttaaaatacaaacagtctcctaatataacagtatctgataatctatggggagacatccattgatattcaggggatgaatcattggcaacacccatttattgtacaaaaagccccaatttacaaacgaaagtccaggtttgatagagacaaacaattaactattttgtctctgtttttaacacctccacagtttttaatttctttagtaatgaaattattcacaatatcagtatcttctttatctaccagagattttactaacttgataaccttggctgtctcattcaatagggtagtaatatttgtatgtgtgatattgatatctttttgaattgtttcttttagaagtgattctttgatggtgccagcatacgaattacaataatgcagaaactcggttaacatgcaggaattatagtaagccaattccaattgttgcctgtgttgtattagagtgtcaatatgagcaatggtgtccttgcgtttctctgatagaatgcgagcagcgattttggcgttatcatttgacgatatttctggaatgacgaatcctgtttctactaactttttggtaggacaaagtgaaacaatcaagaagatagcttctcctcctatttgtggaagaaattgaactcctctagatgatctactgacgatagtatctccttgacagatattggaccgaattacagaagtacctggaatgtaaagccctgaaaccccctcattttttaagcagattgttgccgtaaatcctgcactgtgaccaagatagagagctcctttggtgaatccatctctatgtttcagtttaaccaagaaacagtcagctggtctaaaatttccatctctatctaatacagcatctaacttgatgtcaggaactatgaccggtttaatgttatatgtaacattgagtaaatccttaagttcataatcatcactgtcatcagttatgtacgatccaaacaatgtttctaccggcatagtggatacgaagatgctatccatcagaatgtttccctgattagtattttctatatagctattcttctttaaacgattttccaaatcagtaactatgttcatttttttaggagtaggacgcctagccagtatggaagaggattttctagatcctctcttcaacatctttgatctcgatggaatgcaaaaccccatagtgaaacaaccaacgataaaaataatattgtttttcactttttataattttaccatctgactcatggattcattaatatctttataagagctactaacgtataattctttataactgaactgagatatatacaccggatctatggtttccataattgagtaaatgaatgctcggcaataactaatggcaaatgtatagaacaacgaaattatactagagttgttaaagttaatattttctatgagctgttccaataaattatttgttgtaactgcgttcaagtcataaatcatcttgatactatccagtaaaccgtttttaagttctggaatattatcatcccattgtaaagcccctaattcgactatcgaatatcctgctctgatagcagtttcaatatcgacggacgtcaatactgtaataaaggtggtagtattgtcatcatcgtgataaactactggaatatggtcgttagtaggtacagtaactttacacaacgcgatatataactttccttttgtaccatttttaacgtagttgggacgtcctgcagggtattgttttgaagaaatgatatcgagaacagatttgatacgatatttgttggattcctgattattcactataatataatctagacagatagatgattcgataaatagagaaggtatatcgttggtaggataatacatccccattccagtattctcggatactctattgatgacactagttaagaacatgtcttctattctagaaaacgaaaacatcctacatggactcattaaaacttctaacgctcctgattgtgtctcgaatgcctcgtacaaggatttcaaggatgccatagattctttgaccaacgatttagaattgcgtttagcatctgatttttttattaaatcgaatggtcggctctctggtttgctaccccaatgataacaatagtcttgtaaagataaaccgcaagaaaatttatacgcatccatccaaataaccctagcaccatcggatgatattaatgtattattatagattttccatccacaattattgggccagtatactgttagcaacggtatatcgaatagattactcatgtaacctactagaatgatagttcgtgtactagtcataatatctttaatccaatctaaaaaatttaaaattagattttttacactgttaaagttaacaaaagtattacccgggtacgtggatatcatatatggcattggtccattatcagtaatagctccataaactgatacggcgatggtttttatatgtgtttgatctaacgaggaagaaattcgcgcccacaattcatctctagatatgtatttaatatcaaacggtaacacatcaatttcgggacgcgtatatgtttctaaatttttaatccaaatataatgatgacctatatgccctattatcatactgtcaactatagtacacctagggaacttacgatacatctgtttcctataatcgttaaattttacaaatctataacatgctaaaccttttgacgacagccattcattaatttctgatatggaatctgtattctcgataccgtatcgttctaaagccagtgctatatctccctgttcgtgggaacgctttcgtataatatcgatcaacggataatctgaagtttttggagaataatatgactcatgatctatttcgtccataaacaatctagacataggaattggaggcgatgatcttaattttgtgcaatgagtcgtcaatcctataacttctaatcttgtaatattcatcatcgacataatactatctatgttatcatcgtatattagtataccatgaccttcttcatttcgtgccaaaatgatatacagtcttaaatagttacgcaatatctcaatagtttcataattgttagctgttttcatcaaggtttgtatcctgtttaacatgatggcgttctataacgtctctattttctatttttaattttttaaatttttaacgatttactgtggctagatacccaatctctctcaaatatttttttagcctcgcttacaagctgtttatctatactattaaaactgacgaatccgtgattttggtaatgggttccgtcgaaatttgccgaagtgatatgaacatattcgtcgtcgactatcaacaattttgtattattctgaatagtgaaaaccttcacagatagatcattttgaacacacaacgcatctagacttttggcggttgccatagaatatacgtcgttcttatcccaattaccaactagaagtctgatcttaactcctctattaatggctgcttctataatggagttgtaaatgtcgggccaatagtagctattaccgtcgacacgtgtagtgggaactatggccaaatgttcaatatctatactagtcttagctgacctgagtttatcaataactacatcggtatctagatctctagaatatcccaataggtgttccggagaatcagtaaagaacactccacctataggattcttaatatgatacgcagtgctaactggcaaacaacaagccgcagagcataaattcaaccatgaattttttgcgctattaaaggctttaaaagtatcaaatcttctacgaagatctgtggccagcgggggataatcagaatatacacctaacgttttaatcgtatgtatagatcctccagtaaatgacgcgtttcctacataacatctttcatcatctgacacccaaaaacaaccgagtagtagtcccacattattttttttatctatattaacggttataaaatttatatccgggcagtgactttgtagctctcccagatttcttttccctcgttcatctagcaaaactattattttaatccctttttcagatgcctcttttagtttatcaaaaataagcgctcccctagtcgtactcagaggattacaacaaaaagatgctatgtatatatatttcttagctagagtgataatttcgttaaaacattcaaatgttgttaaatgatcggatctaaaatccatattttctggtagtgtttctaccagcctacattttgctcccgcaggtaccgatgcaaatggccacatttagttaacataaaaacttatacatcctgttctatcaacgattctagaatatcatcggctatatcgctaaaattttcatcaaagtcgacatcacaacctaactcagtcaatatattaagaagttccatgatgtcatcttcgtctatttctatatccgtatccattgtagattgttgaccgattatcgagtttaaatcattactaatactcaatccttcagaatacaatctgtgtttcattgtaaatttataggcggtgtatttaagttggtagattttcaattatgtattaatatagcaacagtagttcttgctcctccttgattctagcatcctcttcattattttcttctacgtacataaacatgtccaatacgttagacaacacaccgacgatggcggccgctacagacacgaatatgactaaaccgatgaccatttaaaaacccctctctagctttcacttaaactgtatcgatcattcttttagcacatgtataatataaaaacattattctatttcgaatttaggcttccaaaaatttttcatccgtaaaccgataataatatatatagacttgttaatagtcggaataaatagattaatgcttaaactatcatcatctccacgattagagatacaatatttacattctttttgctgtttcgaaactttatcaatacacgttaatacaaacccaggaaggagatattgaaactgaggctgttgaaaatgaaacggtgaatacaataattcagataatgtaaaatcatgattccgtattctgatgatattagaactgctaatggatgtcgatggtatgtatctaggagtatctattttaacaaagcatcgatttgctaatatacaattatccttttgattaattgttattttattcatattcttaaaaggtttcatatttatcaattcttctacattaaaaatttccatttttaatttatgtagccccgcaatactcctcattacgtttcattttttgtctataatatccattttgttcatctcggtacatagattatccaattgagaagcgcatttagtagttttgtacattttaagtttattgacgaatcgtcgaaaactagttatagttaacattttattatttgataccctgatattaatacccctgccgttactattatttataactgatgtaatccacgtaacattagaattaattatcgatagtaatgcatcgacgcttccaaaattgtctattataaactcaccgataatttttttattacatgttttcatattcattaggattatcaaatctttaatcttattacgattgtatgcgttgatattgcaagacgtcattctaaaagacggaggatctccatcaaatgccaaacaatcacgtacaaagtacatggaaataggttttgttctattgcgcatcatagatttatatagaacacccgtagaaatactaatttgttttactctataaaatactaatgcatctatttcatcgttttgtataacgtctttccaagtgtcaaattccaaatttttttcattgatagtaccaaattcttctatctctttaactacttgcatagataggtaattacagtgatgcctacatgccgttttttgaaactgaatagatgcgtctagaagcgatgctacgctagtcacaatcaccactttcatatttagaatatatgtatgtaaaaatatagtagaatttcattttgttttttctatgctataaatgaattctcattttgcatctgctcatactccgttttatatcaataccaaagaaggaagatatctggttctaaaagccgttaaagtatgcgatgttagaactgtagaatgcgaaggaagtaaagcttcctgcgtactcaaagtagataaaccctcatcgcccgcgtgtgagagaagaccttcgtccccgtccagatgcgagagaatgaataaccctggaaaacaagttccgtttatgagaacggacatgctacaaaatatgttcgcggctaatcgcgacaacgtggcgtcgagacttttgtcctaaaatacaattatatctttttcgatattaataaatccgtgtcgtccaggttttttatctctttcagtatgtgaatagataggtattttatctctattcatcatcgaatttaagagatccgataaacattgtttgtattctccagatgtcagcatctgatacaacaatatatgtgcacataaacctctggcacttatttcatgtaccttccccttatcactaaggagaatagtatttgagaaatatgtatacatgatattatcatgaattagatatacagaatttgtaacactctcgaaatcacacgatgtgtcggcgttaagatctaatatatcactcgataacacattttcatctagatacactagacattttttaaagctaaaatagtctttagtagtaacagtaactatgcgattattttcatcgatgatacatttcatcggcatattattacgcgtaccatcaaagactataccatgtgtatatctaacgtattctagcatggttgccatacgcgcattaaacttttcaggatctttggatagatcttccaatctatctatttgagaaaacatttttatcatgttcaatagttgaaacgtcggatccactatatagatattatctataaagattttaggaactacgttcatggtatcctggcgaatattaaaactatcaatgatatgattatcgttttcatcttttatcaccatatagtttctaagatatgggattttacttaatataatattatttcccgtgataaattttattagaaaggccaaatctataagaaaagtcctagaattagtctgaagaatatctatatcgccgtatagtatatttggattaattagatatagagaatatgatccgtaacatatacaacttttattatggcgtctaagatattcttccatcaacttattaacatttttgactagggaagatacattatgacgtcccattacttttgccttgtctattactgcgacgttcatagaatttagcatatctcttgccaattcttccattgatgttacattataagaaattttagatgaaattacatttggagctttaatagtaagaactcctaatatgtccgtgtatgtggtcactaatacagattgtagttctataatcgtaaataatttacctatattatatgtttgagtctgtttagaaaagtagctaagtatacgatcttttatttctgatgcagatgtattaacatcggaaaaaaatctttttttattcttttttactaaagatacaaatatgtctttgttaaaaacagttattttctgaatatttctagcttgtaattttaacatatgatattcgttcacactaggtactctgcctaaataggtttctataatctttaatgtaatattaggaaaagtattctgatcaggattcctattcattttgaggatttaaaactctgattattgtctaatatggtctctacgcaaactttttcacagagcgatagagtttttgataactcgtttttcttaagaaatataaaactactgtttccagagctcgctctatcttttattttatctaattcgatacaaactcctgatactggttcagaaagtaattcattaattttcagtcctttatagaagatatttaatatagataatacaaaattttcagttcttgatatcgatctgattgatcctagaactagatatattaataacgtgctcattaggcagtttatggcagcttgataattagatatagtatattccagttcatatttattagataccgcattgcccagattttgatattctatgaattcctctgaaaataaatccaaaataactagacattctattttttgtggattagtgtactctcttccctctatcatgttcactactggtgtccacgatgataaatatctagagggaatataatatagtccataggatgccaatctagcaatgtcgaataactgtaatttgattcttcgttcttcattatgaattgattcttgaggtataaacctaacacaaattatattattagacttttcgtatgtaatgtctttcatgttataagtttttaatcctggaatagaatctattttaatgaggcttttaaacgcagagttctccaacgagtcaaagcataatactctgttgtttttcttatatacgatgttacgattttcttctttgaatggaataggtttttgaattagtttataattacaacataatagataaggaagtgtgcaaatagtacgcggaaaaaacataatagctcccctgttttcatccatggttttaagtaaatgatcactggcttctttagtcaatggatattcgaacattaaccgtttcatcatcattggacagaatccatatttcttaatgtaaagagtgatcaaatcattgtgtttattgtaccatcttgttgtaaatgtgtattcggttatcggatctgctcctttttctattaaagtatcgatgtcaatctcgtctaagaattcaactatatcgacatatttcatttgtatacacataaccattactaacgtagaatgtataggaagagatgtaacgggaacagggtttgttgattcgcaaactattctaatacataattcttctgttaatacgtcttgcacgtaatctattatagatgccaagatatctatataattattttgtaagatgatgttaactatgtgatctatataagtagtgtaataattcatgtattttgatatatgttccaactctgtctttgtgatgtctagtttcgtaatatctatagcatcctcaaaaaatatattcgcatatattcccaagtcttcagttctatcttctaaaaaatcttcaacgtatggaatataataatctattttacctcttctgatatcattaatgatatagtttttgacactatcttctgtcaattgattcttattcactatatctaagaaacggatagcgtccctaggacgaactactgccattaatatctctattatagcttctggacataattcatctattataccagaattaatgggaactattccgtatctatctaacatagttttaagaaagtcagaatctaagacttgatgttcatatattggttcatacatgaaatgatctctattgatgatagtgactatttcattctctgaaaattggtaactcattctatatatgctttccttgttgatgaaggatagaatatactcaatagaatttgtaccaacaaactgttctcttatgaatcgtatatcatcatctgaaataatcatgtaaggcatacatttaacaattagagacttgtctcctgttatcaatatactattcttgtgataatttatgtgtgaggcaaatttgtccacgttctttaattttgttatagtagatatcaaatccaatggagctacagttcttggcttaaacagatatagtttttctggaacaaattctacaacattattataaaggactttgggtaaataagtgggatgaaatcctattttaattaatgcgatagccttgtcctcgtgcagatatccaaacgcttttgtgatagtatggcattcattgtctagaaacgctctacgaatatctgtgacagatatcatctttagagaatatactagtcgcgttaatagtactacaatttgtattttttaatctatctcaataaaaaaattaatatgtatgattcaatgtataactaaactactaactgttattgataactagaatcagaatctaatgatgacgtacccaagaagtttatctactgccaatttagctgcattatttttagcatctcgtttagattttccatctgccttatcgaatactcttccgtcgatatctacacaggcataaaatgtaggagagttactaggcccaactgattcaatacgaaaagaccaatctctcttagttatttggcagtactcattaataacggtgacagggttagcatctttccaatcaataatttttttagccggaataacatcatcaaaagacttatgatcctctctcattgatttttcgcgggatacatcatctattatgacgtcagccataacatcagcatccggcttatccgcctccgttgtcataaaccaacgaggaggaatatcgtcggagctgtacaccatagcactacgttgaagatcgtacagagctttattaacttctcgcttctccatattaagttgtctagttagttgtgcagcagtagctccttcgattccaatggttttaatagcctcacacacaatctctgcgttagaacgttcgtcgatatagattttagacatttttagagagaactaacacaaccagcaataaaactgaacctactttatcatttttttattcatcatcctctggtggttcgtcgttcctatcaaatgtagctctgattaacccgtcatctataggtgatgctggttctggagattctggaggagatggattattatctggaagaatctctgttatttccttgttttcatgtatcgattgcgttgtaacattaagattgcgaaatgctctaaatttgggaggcttaaagtgttgtttgcaatctctacacgcgtgtctaactagtggaggttcgtcagctgctctagtttgaatcatcatcggcgtagtattcctacttttacagttaggacacggtgtattgtatttctcgtcgagaacgttaaaataatcgttgtaactcacatcctttattttatctatattgtattctactcctttcttaatgcattttataccgaataagagatagcgaaggaattctttttcggtgccgctagtacccttaatcatatcacatagtgttttatattccaaatttgtggcaatagacggtttatttctatacgatagtttgtttctggaatcctttgagtattctataccaatattattctttgattcgaatttagtttcttcgatattagattttgtattacctatattcttgatgtagtactttgatgatttttccatggcccattctattaagtcttccaagttggcatcatccacatattgtgatagtaattctcggatatcagtagcggctaccgccattgatgtttgttcattggatgagtaactactaatgtatacattttccatttataacacttatgtattaactttgttcatttatattttttcattattatgttgatattaacaaaagtgaatatatatatatgttaataattgtattgtggttatacggctacaattttataatgagtgaaagtcagtgtccgatgatcaatgacgatagctttactctgaaaagaaagtatcaaatcgatagtgcggagtcaacaataaaaatggataagaagaggataaagtttcagaatagagccaaaatggtaaaagaaataaatcagacaataagagcagcacaaactcattacgagacattgaaactaggatacataaaatttaagagaatgattaggactactactctagaagatatagcaccatctattccaaataatcagaaaacttataaactattctcggacatttcagccatcggcaaagcatcacagaatccgagtaagatggtatatgctctgctgctttacatgtttcccaatttgtttggagatgatcatagattcattcgttatagaatgcatccaatgagtaaaatcaaacacaagatcttctctcctttcaaacttaatcttattagaatattagtggaagaaagattctataataatgaatgcagatctaataaatggaaaataattggaacacaagttgataaaatgttgatagctgaatctgataaatatacaatagatgcaaggtataacctaaaacccatgtatagaatcaagggagaatctgaagaagataccctcttcatcaaacagatggtagaacaatgtgtgacatcccaggaattggtggaaaaagtgttgaagatactgtttagagatttgttcaagagtggagaatacaaagcgtacagatacgatgatgatgtagaaaatggattcattggattggatacactaaaattaaacattgttcatgatatagttgaaccatgtatgcctgttcgtaggccagtggctaagatactgtgtaaagaaatggtaaataaatactttgagaatccgctacatattattggtaagaatcttcaagagtgcattgactttgttagtgaataggcatttcatctttctccaatactaattcaaattgttaaattaataatggatagtataaatagtaaaaataattattagaataagagtgtagtatcatagataactctcttctataaaaatggattttattcgtagaaagtatcttatatacacagtagaaaataatatagattttttaaaggatgatacattaagtaaagtaaacaattttaccctcaatcatgtactagctctcaagtatctagttagcaattttcctcaacacgttattactaaggatgtattagctaataccaatttttttgttttcatacatatggtacgatgttgtaaagtgtacgaagcggttttacgacacgcatttgatgcacccacgttgtacgttaaagcattgactaagaattatttatcgtttagtaacgcaatacaatcgtacaaggaaaccgtgcataaactaacacaagatgaaaaatttttagaggttgccgaatacatggacgaattaggagaacttataggcgtaaattatgacttagttcttaatccattatttcacggaggggaacccatcaaagatatggaaatcatttttttaaaactgtttaagaaaacagacttcaaagttgttaaaaaattaagtgttataagattacttatttgggcatacctaagcaagaaagatacaggcatagagtttgcggataatgatagacaagatatatacactctatttcaacaaactggtagaatcgtccatagcaatctaacagaaacgtttagagattatatctttcccggagataagactagctattgggtgtggttaaacgaaagtatagctaatgatgcggatatcgttcttaatagacccgccattaccatgtatgataaaattcttagttatatatactctgagataaaacaaggacgcgttaataaaaacatgcttaagttagtttatatctttgagcctgaaaaagatatcagagaacttctgctagaaatcatatatgatattcctggagatatcctatctattattgatgcaaaaaacgacgattggaaaaaatattttattagtttttataaagctaattttattaacggtaatacatttattagtgatagaacgtttaacgaggacttattcagagttgttgttcaaatagatcccgaatatttcgataatgaacgaattatgtctttattctctacgagtgctgcggacattaaacgatttgatgagttagatattaataacagttatatatctaatataatttatgaggtgaacgatatcacattagatacaatggatgatatgaagaagtgtcaaatctttaacgaggatacgtcgtattatgttaaggaatacaatacatacctgtttttgcacgagtcggatcccatggtcatagagaacggaatactaaagaaactgtcatctataaaatccaagagtagacggctgaacttgtttagcaaaaacattttaaaatattatttagacggacaattggctcgtctaggtcttgtgttagatgattataaaggagacttgttagttaaaatgataaaccatcttaagtctgtggaggatgtatccgcattcgttcgattttctacagataaaaaccctagtattcttccatcgctaatcaaaactattttagctagttataatatttccatcatcgtcttatttcaaaggtttttgagagataatctatatcatgtagaagaattcttggataaaagcatccatctaaccaagacggataagaaatatatacttcaattgataagacacggtagatcatagaacagaccaaatatattattaataatttgtatatacatagatataattatcacatatttttgataaatgggaactgctgcaacaattcagactcccaccaaattaatgaataaagaaaatgcagaaatgattttggaaaaaattgttgatcatatagttatgtatattagtgacgaatcaagtgattcagaaaataatcctgaatatattgattttcgtaacagatacgaagactatagatctctcattataaaaagtgatcacgagtttgtaaagctatgtaaaaatcatgcggagaaaagttctccagaaacgcaacaaatgattatcaaacacatatacgaacaatatcttattccagtatctgaagtactattaaaacctataatgtccatgggtgacataattacatataacggatgtaaagacaatgaatggatgctagaacaactctctaccctaaactttaacaatctccgcacatggaactcatgtagcataggcaatgtaacgcgtctgttttatacattttttagttatctgatgaaagataaactaaatatataagtataatcccattctaatactttaacctgatgtattagcatcttattagaatattaacctaactaaaagacataacataaaaactcattacatagttgataaaaagcggtaggatataaatattatggctgccaccgttccgcgttttgacgacgtgtacaaaaatgcacaaagaagaattctagatcaagaaacattttttagtagaggtctaagtagaccgttaatgaaaaacacatatctatttgataattacgcgtatggatggataccagaaactgcaatttggagtagtagatacgcaaacttagatgcaagtgactattatcccatttcgttgggattacttaaaaagttcgagtttctcatgtctctatataaaggtcctattccagtatacgaagaaaaagtaaatactgaattcattgctaatggatctttctccggtagatacgtatcatatcttagaaagttttctgctcttccaacaaacgagtttattagttttttgttactgacttccattccaatctataatatcttgttctggtttaaaaatactcagtttgatattactaaacacacattattcagatacgtctatacagataatgccaaacacctggcgttggctaggtatatgtatcaaacaggagactataagcctttgtttagtcgtctcaaagagaattatatatttaccggtcccgttccaatatgtatcaaagatatagatcaccctaatcttagtagagcaagaagtccatccgattatgagacattagctaatattagtactatattgtactttaccaagtatgatccggtattaatgtttttattgttttacgtacctgggtattcaattactacaaaaattactccagccgtagaatatctaatggataaactgaatctaacaaagagcgacgtacaactgttgtaaattattttatgcttcgtaaaatgtaggttttgaaccaaacattctttcaaagaatgagatgcataaaactttattatccaatagattgactatttcggacgtcaatcgtttaaagtaaacttcgtaaaatattctttgatcactgccgagtttaaaacttctatcgataattgtttcatatgttttaatatttacaagttttttggtccatggtccattaggacaaatatatgcaaaataatatcgttctccaagttctatagtctctggattatttttattatattcagtaaccaaatacatattagggttatctgcggatttataatttgagtgatgcattcgactcaacataaataattctagaggagacgatctactatcaaattcggatcgtaaatctgtttctaaagaacggagaatatctatacatacctgattagaattcatccgtccttcagacaacatctcagacagtctggtcttgtatgtcttaatcatattcttatgaaacttggaaacatctcttctagtttcactagtacctttattaattctctcaggtacagattttgaattcgacgatgccgagtatttcatcgttgtatatttcttcttcgattgcataatcagattcttatataccgcctcaaactctattttaaaattattaaacaatactctattattaatcagtcgttctaactctttcgctatttctatagacttatctacatcttgactgtctatctctgtaaacacggagtcggtatctccatacacgctacgaaaacgaaatctgtaatctataggcaacgatgttttcacaatcggattaatatctctatcgtccatataaaatggattacttaatggattggcaaaccgtaacataccgttagataactctgctccatttagtaccgattctagatacaagatcattctacgtcctatggatgtgcaactcttagccgaagcgtatgagtatagagcactatttctaaatcccatcagaccatatactgagttggctactatcttgtacgtatattgcatggaatcatagatggccttttcagttgaactggtagcctgttttagcatctttttatatctggctctctctgccaaaaatgttcttaatagtctaggaatggttccttctatcgatctatcgaaaattgctatttcagagatgaggttcggtagtctaggttcacaatgaaccgtaatatatctaggaggtggatatttctgaagcaatagctgattatttatttcttcttccaatctattggtactaacaacgacaccgactaatgtttccggagatagatttccaaagatacacacattaggatacagactgttataatcaaagattaatacattattactaaacattttttgttttggagcaaataccttaccgccttcataaggaaacttttgttttgtttctgatctaactaagatagttttagtttccaacaatagctttaacagtggacccttgatgactgtactcgctctatattcgaataccatggattgaggaagcacatatgttgacgcacccgcgtctgtttttgtttctactccataatactcccacaaatactgacacaaacaagcatcatgaatacagtatctagccatatctaaagctatgtttagattataatccttatacatctgagctaaatcaacgtcatcctttccgaaagataatttatatgtatcattaggtaaagtaggacataatagtacgactttaaatccattttcccaaatatctttacgaattactttacatataatatcctcatcaacagtcacataattacctgtggttaaaacctttgcaaatgcagcggctttgcctttcgcgtctgtagtatcgtcaccgatgaacgtcatttctctaactcctctatttaatactttacccatgcaactgaacgcgttcttggatatagaatccaatttgtacgaatccaatttttcaaatttttgaatgaatgaatatagatcgaaaaatatagttccattattgttattaacgtgaaacgtagtattggccatgccgcctactcccttatgactagactgatttctctcataaatacagagatgtacagcttcctttttgtccggagatctaaagataatcttctctcctgttaataactctagacgattagtaatatatctcagatcaaagttatgtccgttaaaggtaacgacgtagtcgaacgttagttccaacaattgtttagctattcgtaacaaaactatttcagaacataaaactagttctcgttcgtaatccatttccattagtgactgtatcctcaaacatcctctatcgacggcttcttgtatttcctgttccgttaacatctcttcattaatgagcgtaaacaataatcgtttaccacttaaatcgatataacagtaacttgtatgcgagattgggttaataaatacagaaggaaacttcttatcgaagtgacactctatatctagaaataagtacgatcttgggatatcgaatctaggtatttttttagcgaaacagttacgtggatcgtcacaatgataacatccattgttaatctttgtcaaatattgctcgtccaacgagtaacatccgtctggagatatcccgttagaaatataaaaccaactaatattgagaaattcatccatggtggcattttgtatgctgcgtttctttggctcttctatcaaccacatatctgcgacggagcattttctatctttaatatctagattataacttattgtctcgtcaatgtctatagttctcatctttcccaacggcctcgcattaaatggaggaggagacaatgactgatatatttcgtccgtcactacgtaataaaagtaatgaggaaatcgtataaatacggtctcaccatttcgacatctggatttcagatataaaaatctgttttcaccgtgactttcaaaccaattaatgcaccgaacatccatttatagaatttagaaatatattttcatttaaatgaatcccaaacattggggaagagccgtatggaccattatttttatagtactttcgcaagcgggtttagacggcaacatagaagcgtgtaaacgaaaactatatactatagttagcactcttccatgtcctgcatgtagacggcacgcgactatcgctatagaggacaataatgtcatgtctagcgatgatctgaattatatttattattttttcatcagattatttaacaatttggcatctgatcccaaatacgcgatcgatgtgacaaaggttaaccctttataaacttaacccattataaaacttatgattagtcacgactgaaataaccgcgtgattattttttggtataattctacacggcatggtttctgtgactatgaattcaacccccgttacattagtgaaatctttaacaaacagcaagggttcgtcaaagacataaaactcattgtttacgatcgaaatagaccccctatcacacttaaaataaaaaatatccttatcctttaccaccaaataaaattctgattggtcaatgtgaatgtattcacttaacagttccacaaatttatttattaactccgaggcacatacatcgtcggtattttttatggcaaactttactcttccagcatccgtttctaaaaaaatattaacgagttccatttatatcatccaatattattgaaatgacgttgatggacagatgatacaaataagaaggtacggtacctttgtccaccatctcctccaattcatgctctattttgtcattaactttaatgtatgaaaacagtacgccacatgcttccatgacagtgtgtaacactttggatacaaaatgtttgacattagtataattgtccaagactgtcaatctataatagatagtagctataatatattctatgatggtattgaagaagatgacaaccttggcatattgatcatttaacacagacatggtatcaacagatagcttgaatgaaagagaatcagtaattggaataagcgtcttctcgatagagtgtccgtataccaacatgtctgatattttgatgtattccattaaattatttagttttttctttttattttcgttaaacagcatttctgtcaacggaccccaacatcgttgaccgattaagttttgattgatttttccgtgtaatgcgtatctagtcagatcgtatagcctatccaataatccatcgtctgtgtgtagatcacatcgtacactttttaattctctatagaagagcgacagacatctggagcaattacagacagcaatttctttattctctacagatgtaagatacttgaagacattcctatgatgatgcagaattttggataacacggtattgatggtatctgttaccataattcctttgatggctgatagtgtcagagcacaagatttccaatctttgacaatttttagcaccattatctttgttttgatatctatatcagacagcatggtgcgtctgacaacacagggattaagacggaaagatgaaatgattctctcaacatcttcaatagataccttgctattttttctggcattatctatatgtgcgagaatatcctctagagaatcagtatcctttttgatgatagtggatctcaatgacatgggacgtctaaaccttcttattctatcaccagattgcatggtgatttgtcttctttcttttatcataatgtaatctctaaattcatcggcaaattgtctatatctaaaatcataatatgagatgtttacctctacaaatatctgttcgtccaatgttagagtatttacatcagttttgtattccaaattaaacatggcaacggatttaattttatattcctctattaagtcctcgtcgataataacagaatgtagataatcatttaatccatcgtacatggttggaagatgcttgttgacaaaatctttaattgtcttgatgaaggtgggactatatctaacatcttgattaataaaatttataacattgtccataggatactttgtaactagttttatacacatctcttcatcggtaagtttagacagaatatcgtgaacaggtggtatattatattcatcagatatacgaagaacaatgtccaaatctatattgtttaatatattatatagatgtagcgtagctcctacaggaatatctttaactaagtcaatgatttcatcaaccgttagatctattttaaagttaatcatataggcattgatttttaaaaggtatgtagccttgactacattctcattaattaaccattccaagtcactgtgtgtaagaagattatattctatcataagcttgactacatttggtcccgataccattaaagaattcttatgatataaggaaacagcttttaggtactcatctactctacaagaattttggagagccttaacgatatcagtgacgtttattatttcaggaggaaaaaacctaacattgagaatatcggaattaatagcttccagatacagtgattttggcaatagtccgtgtaatccataatccagtaacacgagctggtgcttgctagacaccttttcaatgtttaatttttttgaaataagctttgataaagccttcctcgcaaattccggatacatgaacatgtcggcgacatgattaagtattgttttttcattattttctcaataccccaatagatgatagaatatcacccaatgcgtccatgttgtctatttccaacaggtcgctatatccaccaatagaagtttttccaaaaaagattctaggaacagttctaccaccagtaatttgttcaaaatagtcacgcaattcattttcgggtttaaattctttaatatcgacaatttcatacgctcctcttttgaaactaaacttatttagaatatccagtgcatttctacaaaaaggacatgtatacttgacaaaaattgtcactttgttattggccaacctttgttgtacaaattcctcggccattttaatatttaagtgatataaaactatctcgacttatttaactctttagtcgagatatatggacgcagatagctatatgatagccaactacagaaggcaaacgctataaaaaacataattacgacgagcatatttataaatatttttattcagcattacttgatatagtaatattaggcacagtcaaacattcaaccactctcgatacattaactctctcattttctttaacaaattctgcaatatcttcgtaaaaagattcttgaaactttttagaatatctatcgactctagatgaaatagcgttcgtcaacatactatgttttgtatacataaaggcgcccattttaacagtttctagtgacaaaatgctagcgatcctaggatcctttagaatcacatagattgacgattcgtctctcttagtaactctagtaaaataatcatacaatctagtacgcgaaataatattatccttgacttgaggagatctaaacaatctagttttgagaacatcgataagttcatcgggaatgacatacatactatctttaatagaactcttttcatccagttgaatggattcgtccttaaccaactgattaatgagatcttctattttatcattttccagatgatatgtatgtccattaaagttaaattgtgtagcgcttctttttagtctagcagccaatactttaacatcactaatatcgatatacaaaggagatgatttatctatggtattaagaattcgtttttcgacatctgtcaaaaccaattcctttttgcctgtatcatccagttttccatcctttgtaaagaaattattttctactagactattaataagactgataaggattcctccataattgcacaatccaaactttttcacaaaactagactttacaagatctacaggaatgcgtacttcaggttttttagcttgtgattttttcttttgcggacattttcttgtgaccaactcatctaccatttcattgattttagcagtgaaataagctttcaatgcacgggcactgatactattgaaaacgagttgatcttcaaattccgccatttaagttcaccaaacaacttttaaatacaaatatatcaatagtagtagaataagaactataaaaaaaataataattaaccaataccaaccccaacaaccggtattattagttgatgtgactgttttctcatcacttagaacagatttaacaatttctataaagtctgtcaaatcatcttccggagaccccataaatacaccaaatatagcggcgtacaacttatccatttatacattgaatattggcttttctttatcgctatcttcatcatattcatcatcaatatcaacaagtcccagattacgagccagatcttcttctacattttcagtcattgatacacgttcactatctccagagagtccgataacgttagccaccacttctctatcaatgattagtttcttgagcgcgaaagtaatttttgtttccgttccggatctatagaagacgataggtgtgataattgccttggccaattgtctttctcttttactgagtgattctagttcaccttctatagatctgagaatggatgattctccagtcgaaacatattctaccatggatccgtttaatttgttgatgaagatggattcatccttaaatgttttctctgtaatagtttccaccgaaagactatgcaaagaatttggaatgcgttccttgtgcttaatgtttccatagacggcttctagaagttgatacaacataggactagccgcggtaacttttatttttagaaagtatccatcgcttctatcttgtttagatttatttttataaagtttagtctctccttccaacataataaaagtggaagtcatttgactagataaactatcagtaagttttatagagatagacgaacaattagcgtattgagaagcatttagtgtaacgtattcgatacattttgcattagatttactaatcgattttgcatactctataacacccgcacaagtctgtagagaatcgctagatgcagtaggtcttggtgaagtttcaactctcttcttgattaccttactcatgattaaacctaaataattgtactttgtaatataatgatatatattttcactttatctcatttgagaataaaaatgtttttgtttaaccactgcatgatgtacagatttcggaatcgcaaaccaccagtggttttattttatccttgtccaatgtgaattgaatgggagcggatgcgggtttcgtacgtagatagtacattcccgtttttagaccgagactccatccgtaaaaatgcatactcgttagtttggaataactcggatctgctatatggatattcatagattgactttgatcgatgaaggctcccctgtctgcagccatttttatgatcgtcttttgtggaatttcccaaatagttttataaactcgcttaatatcttctggaaggtttgtattctgaatggatccaccatctgccataatcctattcttgatctcatcattccataattttctctcggttaaaactctaaggagatgcggattaactacttgaaattctccagacaatactctccgagtgtaaatattactggtatacggttccaccgactcattatttcccaaaatttgagcagttgatgcagtcggcataggtgccaccaataaactatttctaagaccgtatgttctgattttatcttttagaggttcccaattccaaagatccgacggtacaacattccaaagatcatattgtagaataccgttactggcgtacgatcctacatatgtatcgtatggtccttccttctcagctagttcacaactcgcctctaatgcaccgtaataaatggtttcgaagatcttcttatttagatcttgtgcttccaggctatcaaatggataatttaagagaataaacgcgtccgctaatccttgaacaccaataccgataggtctatgtctcttattagagatttcagcttctggaataggataataattaatatctataattttattgagatttctgacaattactttgaccacatccttcagtttgagaaaatcaaatcgcccatctattacaaacatgttcaaggcaacagatgccagattacaaacggctacctcattagcatccgcatattgtattatctcagtgcaaagattactacacttgatagttcctaaattttgttgattactctttttgttacacgcatccttataaagaatgaatggagtaccagtttcaatctgagattctataatcgctttccagacgactcgagcctttattatagatttgtatctcctttctctttcgtatagtgtatacaatcgttcgaactcgtctccccaaacattgtccaatccaggacattcatccggacacatcaacgaccactctccgtcatccttcactcgtttcataaagagatcaggaatccaaagagctataaatagatctctggttctatgttcctcgtttcctgtattctttttaagatcgaggaacgccataatatcagaatgccacggttccaagtatatggccataactccaggccgtttgtttcctccctgatctatgtatctagcggtgttattataaactctcaacattggaataataccgtttgatataccattggtaccggagatatagcttccactggcacgaatattactaattgatagacctattccccctgccattttagagattaatgcgcatcgttttaacgtgtcatagataccctctatgctatcatcgatcatgttaagtagaaaacagctagacatttggtgacgactagttcccgcattaaataaggtaggagaagcgtgcgtaaaccatttttcagaaagtagattgtacgtctcaatagctgagtctatatcccattgatgaattcctactgcgacacgcattaacatgtgctgaggtctttcaacgatcttgttgtttattttcaacaagtaggatttttccaaagttttaaaaccaaaatagttgtatgaaaagtctcgttcgtaaataataaccgagttgagtttatccttatatttgttaactatatccatggtgatacttgaaataatcggagaatgtttcccatttttaggattaacatagttgaataaatcctccatcacttcactaaatagtttttttgtttccttgtgtagatttgatacggctattctggcggctagaatggcataatccggatgttgtgtagtacaagtggctgctatttcggctgccagagtgtccaattctaccgttgttactccattatatattccttgaataaccttcatagctattttaataggatctatatgatccgtgtttaagccataacataattttctaatacgagacgtgattttatcaaacatgacattttccttgtatccatttcgtttaatgacaaacatttttgttggtgtaataaaaaaattatttaacttttcattaatagggatttgacgtatgtagcgtacaaaatgatcgttcctggtatatagataaagagtcctatatatttgaaaatcgttacggctcgattaaactttaatgattgcatagtgaatatatcattaggatttaactccttgactatcatggcggcgccagaaattaccatcaaaagcattaatacagttatgccgatcgcagttaaaacggttatagcatccaccatttatatctaaaaattagatcaaagaatatgtgacaaagtcctagttgtatactgagaattgacgaaacaatgtttcttacatatttttttcttattagtaactgacttaatagtaggaactggaaagctagacttgattattctataagtatagatacccttccagataatgttctctttgataaaagttccagaaaatgtagaattttttaaaaagttatcttttgctattaccaagattgtgtttagacgcttattattaatatgagtgatgaaatccacaccgcctctagatatcgcctttatttccacattagatggtaaatccaatagtgaaactatctttttaggaatgtatggactcgcgtttagaggagtgaacgtcttgggcgtcggaaaggatgattcgtcaaacgaataaacaatttcacaaatggatgttaatgtattagtaggaaatttcttgacgctattggaattgaagattctaatggatgatgttctacctatttcatccgataacatgttaatttccgacaccaacggttttaatatttcgatgatatacggtagtctctctttcggacttatatagcttattccacaatacgagtcattatatactccaaaaaacaaaataactagtataaaatctgtatcgaatgggaaaaacgaaattatcgacataggtatagaatccggaacattgaacgtattaatacttaattctttttctgtggtaagtaccgataggttattgacattgtatggttttaaatattctataacttgagacttgatagatattagtgatgaattgaaaattatttttatcaccacgtgtgtttcaggatcatcgtcgacgcctgtcaaccaaccgaatggagtaaaataaatatcattaatatatgctctagatattagtatttttattaatcctttgattatcatcttctcgtaggcgaatgattccatgatcaagagtgatttgagaacatcctccggagtattaatgggcttagtaaacagtccatcgttgcaataataaaagttatccaagttaaaggatattatgcattcgtttaaagatatcacctcatctgacggagacaattttttggtaggttttagagactttgaagctacttgtttaacaaagttattcatcgtcgtctactattctatttaattttgtagttaatttatcacatatcacattaattgactttttggtccatttttccatacgtttatattcttttaatcctgcgttatccgtttccgttatatccagggatagatcttgcaagttaaatagaatgctcttaaataatgtcattttcttatccgctaaaaatttaaagaatgtataaacctttttcagagatttgaaactcttaggtggtgtcctagtacacaatatcataaacaaactaataaacattccacattcagattccaacagctgattaacttccacattaatacagcctattttcgctccaaatgtacattcgaaaaatctgaataaaacatcgatgtcacaatttgtattatccaatacagaatgtttgtgattcgtgttaaaaccatcggagaaggaatagaaataaaaattattatagtggtggaattcagttggaatattgcctccggagtcataaaaggatactaaacattgttttttatcataaattacacatttccaatgagacaaataacaaaatccaaacattacaaatctagaggtagaacttttaattttgtctttaagtatatacgataagatatgtttattcataaacgcgtcaaatttttcatgaatcgctaaggagtttaagaatctcatgtcaaattgtcctatataatccacttcggatccataagcaaactgagagactaagttcttaatacttcgattgctcatccaggctcctctctcaggctctattttcatcttgacgacctttggattttcaccagtatgtattcctttacgtgataaatcatcgattttcaaatccatttgtgagaagtctatcgccttagatactttttcccgtagtcgaggtttaaaaaaatacgctaacggtatactagtaggtaactcaaagacatcatatatagaatggtaacgcgtctttaactcgtcggttaactctttcttttgatcgagttcgtcgctactattgggtctgctcaggtgccccgactctactagttccaacatcataccgataggaatacaagacactttgccggcggttgtagatttatcatatttttccactacatatccgttacaatttgttaaaaatttagatacatctatattgctacataatccagctagtgaatatatatgacataataaattggtaaatcctagttctggtattttactaattactaaatctgtatatctttccatttatcatggaaaagaatttaccagatatcttcttttttccaaactgcgttaatgtattctcttacaaatattcacaagatgaattcagtaatatgagtaaaacggaacgtgatagtttctcattggccgtgtttccagttataaaacatagatggcataacgcacacgttgtaaaacataaaggaatatacaaagttagtacagaagcacgtggaaaaaaagtatctcctccatcactaggaaaacccgcacacataaacctaaccgcgaagcaatatatatacagtgaacacacaataagctttgaatgttatagttttctaaaatgtataacaaatacagaaatcaattcgttcgatgagtatatattaagaggactattagaagctggtaatagtttacagatattttccaattccgtaggtaaacgaacagatactataggtgtactagggaataagtatccatttagcaaaattccattggcctcattaactcctaaagcacaacgagagatattttcagcgtggatttctcatagacctgtagttttaactggaggaactggagtgggtaagacgtcacaggtacccaagttattgctttggtttaattatttatttggtggattctctactctagataaaatcactgactttcacgaaagaccagtcattctatctcttcctaggatagctttagttagattgcatagcaataccattttaaaatcattgggatttaaggtactagatggatctcctatttctttacggtacggatctataccggaagaattaataaacaaacaaccaaaaaaatatggaattgtattttctacccataagttatctctaacaaaactatttagttatggcactcttattatagacgaagttcatgagcatgatcaaataggagatattattatagcagtagcgagaaagcatcatacgaaaatagattctatgtttttaatgactgccacgttagaggatgacagggaacggctaaaagtatttttacctaatcccgcatttatacatattcctggagatacactgtttaaaattagcgaggtatttattcataataagataaatccatcttccagaatggcatacatagaagaagaaaagagaaatttagttactgctatacagatgtatactcctcctgatggatcatccggtatagtctttgtggcatccgttgcacagtgtcacgaatataaatcatatttagaaaaaagattaccgtatgatatgtatattattcatggtaaggtcttagatatagacgaaatattagaaaaagtgtattcatcacctaatgtatcgataattatttctactccttatttggaatccagcgttactatacgcaatgttacacacatttatgatatgggtagagtttttgtccccgctccttttggaggatcgcaacaatttatttctaaatctatgagagatcaacgaaaaggaagagtaggaagagttaatcctggtacatacgtctatttctatgatctgtcttatatgaagtctatacagcgaatagattcagaatttctacataattatatattgtacgctaataagtttaatctaacactccccgaagatttgtttataatccctacaaatttggatattctatggcgtacaaaggaatatatagactcgttcgatattagtacagaaacatggaataaattattatccaattattatatgaagatgatagagtatgctaaactttatgtactaagtcctattctcgctgaggagttggataactttgagaggacgggagaattaactagtattgtacgagaagccattttatctctaaatttacaaattaagattttaaattttaaacataaagatgatgatacgtatatacacttttgtaaaatattattcggtgtctataacggaacaaacgctactatatattatcatagacctctaacgggatatatgaatatgatttcagatactatatttgttcctgtagataataactaaaaatcaaactctaatgaccacatctttttttagagatgaaaaattttccacatctccttttgtagacacgactaaacattttgcagaaaaaagtttattagtgtttagataatcgtatacttcatcagtgtagatagtaaatgtgaacagataaaaggtattcttgctcaatagattggtaaattccatagaatatattaatcctttcttcttgagatcccacatcatttcaaccagagacgttttatccaatgatttacctcgtactataccacatacaaaactagattttgcagtgacgtcgtacctggtattcctaccaaacaaaattttacttttagttcttttagaaaattctaaggtagaatctctatttgccaatatgtcatctatggaattaccactagcaaaaaatgatagaaatatatattgatacatcgcagctggttttgatctactatactttaaaaacgaatcagattccataattgcctgtatatcatcagctgaaaaactatgttttacacgtattccttcggcatttctttttaatgatatatcttgtttagacaatgataaagttatcatgtccatgagagacgcgtctccgtatcgtataaatatttcattagatgttagacgcttcattaggggtatacttctataaggtttcttaatcagtccatcattggttgcgtcaagaactactatcggatgttgttgggtatctctagtgttacacatggccttactaaagtttgggtaaataactatgatatctctattaattatagatgcatatatttcattcgtcaaggatattagtatcgacttgctatcgtcattaatacgtgtaatgtaatcatataaatcatgcgatagccaaggaaaatttaaatagatgttcatcatataatcgtcgctataattcatattaatacgttgacattgactaatttgtaatatagcctcgccacgaagaaagctctcgtattcagtttcatcgataaaggataccgttaaatataactggttgccgatagtctcatagtctattaagtggtaagtttcgtacaaatacagaatccctaaaatattatctaatgttggattaatctttaccataactgtataaaatggagacggagtcataactattttaccgtttgtacttactggaatagatgaaggaataatctccggacatgctggtaaagacccaaatgtctgtttgaagaaatccaatgttccaggtcctaatctcttaacaaaaattacgatattcgatcccgatatcctttgcattctatttaccagcatatcacgaactatattaagattatctatcatgtctattctcccaccgttatataaatcgcctccgctaagaaacgttagtatatccatacaatggaatacttcatttctaaaatagtattcgttttctaattctttaatgtgaaatcgtatactagaaagggaaaaattatctttgagttttccgttagaaaagaaccacgaaactaatgttctgattgcgtccgattccgttgctgaattaatggatttacaccaaaaactcatataacttctagatgtagaagcattcgctaaaaaattagtagaatcaaaggatataagtagatgttccaacaagtgagcaattcccaagatttcatctatatcattctcgaatccgaaattagaaattcccaagtagatatcctttttcatccgatcgttgatgaaaatacgaactttattcggtaagacaatcatttactaaggagtaaaataggaagtaatgttcgtatgtcgttatcatcgtataaattaaaggtgtgttttttaccattaagtgacattataattttaccaatattggaattataatataggtgtatttgcgcactcgcgacggttgatgcatcggtaaatatagctgtatctaatgttctagtcggtatttcatcatttcgctgtctaataatagcgttttctctatctgtttccattacagctgcctgaagtttattggtcggataatatgtaaaataataagaaatacatacgaataacaaaaataaaataagatataataaagatgccatttagagatctaattttgtttaacttgtccaaattcctacttacagaagatgaggaatcgttggagatagtgtcttccttatgtagaggatttgaaatatcttataatgacttgataacttactttccagataggaaataccataaatatatttataaagtatttgaacatgtagatttatcggaggaattaagtatggaattccatgatacaactctgagagatttagtctatcttagattgtacaagtattccaagtgtatacggccgtgttataaattaggagataatctaaaaggcatagttgttataaaggacaggaatatttatattagggaagcaaatgatgacttgatagaatatctcctcaaggaatacactcctcagatttatacatattctaatgagcgcgtccccataactggttcaaaattaattctttgtggattttctcaagttacatttatggcgtatacaacgtcgcatataacaacaaataaaaaggtagatgttctcgtttccaaaaaatgtatagatgaactagtcgatccaataaattatcaaatacttcaaaatttatttgataaaggaagcggaacaataaacaaaatactcaggaagatattttattcggtaacaggtggccaaactccataggtagctttttctatttcggattttagaatttccaaattcaccagcgatttatcggttttggtgaaatccaaggatttattaatgtccacaaatgccatttgttttgtctgtggattgtatttgaaaatggaaacgatgtagttagatagatgcgctgcgaagtttcctattagggttccgcgcttcacgtcacccagcatacttgaatcaccatcctttaaaaaaaatgataagatatcaacatggagtatatcatactcggattttaattcttctactgcatcactgacattttcacaaatactacaatacggtttaccgaaaataatcagtacgttcttcatttatgggtatcaaaaacttaaaatcgttactgctggaaaataaatcactgacgatattagatgataatttatacaaagtatacaatggaatatttgtggatacaatgagtatttatatagccgtcgccaattgtgtcagaaacttagaagagttaactacggtattcataaaatacgtaaacggatgggtaaaaaagggagggcatgtaaccctttttatcgatagaggaagtataaaaattaaacaagacgttagagacaagagacgtaaatattctaaattaaccaaggacagaaaaatgttagaattagaaaagtgtacatccgaaatacaaaatgttaccggatttatggaagaagaaataaaggcagaaatgcaattaaaaatcgataaactcacatttcaaatatatttatctgattctgataacataaaaatatcattgaatgagatactaacacatttcaacaataatgagaatgttacattattttattgtgatgaacgagacgcagaattcgttatgtgtctcgaggctaaaacacatttctctaccacaggagaatggccgttgataataagtaccgatcaggatactatgctatttgcatctgctgataatcatcctaagatgataaaaaacttaactcaactgtttaaatttgttccctcggcagaggataactatttagcaaaattaacggcgttagtgaatggatgtgatttctttcctggactctatggggcatctataacacccaccaacttaaacaaaatacaattgtttagtgattttacaatcgataatatagtcactagtttggcaattaaaaattattatagaaagactaactctaccgtagacgtgcgtaatattgttacgtttataaacgattacgctaatttagacgatgtctactcgtatattcctccttgtcaatgcactgttcaagaatttatattttccgcattagatgaaaaatggaatgaatttaaatcatcttatttagaaagcgtgccgttaccctgccaattaatgtacgcgttagaaccacgcaaggagattgatgtttcagaagttaaaactttatcatcttatatagatttcgaaaatactaaatcagatatcgatgttataaaatctatatcctcgatcttcggatattctaacgaaaactgtaacacgatagtattcggcatctataaggataatttactactgagtataaataattcattttactttaacgatagtctgttaataaccaatactaaaagtgataatataataaatataggttactagattaaaaatggtgttccaactcgtgtgctctacatgcggtaaagatatttctcacgaacgatataaattgattatacgaaaaaaatcattaaaggatgtactcgtcagtgtaaagaacgaatgttgtaggttaaaattatctacacaaatagaacctcaacgtaacttaacagtgcaacctctattggatataaactaatatggatccggttaattttatcaagacatatgcgcctagaggttctattatttttattaattataccatgtcattaacaagtcatttgaatccatcgatagaaaaacatgtgggtatttattatggtacgttattatcggaacacttggtagttgaatctacctatagaaaaggagttcgaatagtcccattggatagtttttttgaaggatatcttagtgcaaaagtatacatgttagagaatattcaagttatgaaaatagcagctgatacgtcattaactttattgggtattccgtatggatttggtcataatagaatgtattgttttaaattggtagctgactgttataaaaatgccggtattgatacatcgtctaaacgaatattgggcaaagatatttttctgagccaaaacttcacagacgataatagatggataaagatatatgattctaataatttaacattttggcaaattgattaccttaaagggtgagttaatatgcataactactcctccgttgttttttccctcgttctttttcttaacgttgtttgccatcactctcataatgtaaagatattctaaaatggtaaacttttgcatatcggacgcagaaattggtataaatgttgtaattgtattatttcccgtcaatggactagtcacagctccatcagttttatatcctttagagtatttctcactcgtgtctaacattctagagcattccatgatctgtttatcgttgatattggccggaaagatagattttttattttttattatattactattggcaattgtagatataacttctggtaaatatttttctaccttttcaatctcttctattttcaagccggctatatattctgctatattgttgctagtatcaataccttttctggctaagaagtcatatgtggtattcactatatcagttttaactggtagttccattagcctttccacttctgcagaataatcagaaattggttctttaccagaaaatccagctactataataggctcaccgatgatcattggcaaaatcctatattgtaccagattaatgagagcatatttcatttccaataattctgctagttcttgagacattgatttatttgatgaatctagttggttctctagatactctaccatttctgccgcatacaataacttgttagataaaatcagggttatcaaagtgtttagcgtggctagaatagtgggcttgcatgtattaaagaatgcggtagtatgagtaaaccgttttaacgaattatatagtctccagaaatctgtggcgttacatacatgagccgaatgacatcgaagattgtccaatatttttaatagctgctctttgtccattatttctatatttgactcgcaacaattgtagataccattaatcaccgattcctttttcgatgccggacaatagcacaattgtttagctttggactctatgtattcagaattaatagatatatctctcaatacagattgcactatacattttgaaactatgtcaaaaattgtagaacgacgctgttctgcagccatttaactttaaataatttacaaaaatttaaaatgagcatccgtataaaaatcgataaactgcgccaaattgtggcatatttttcagagttcagtgaagaagtgtctataaatgtagactcgacggatgagttaatgtatatttttgccgccttgggcggatctgtaaacatttgggcaattatacctctaagtgcatcagtgttttaccgaggagccgaaaatattgtgtttaatcttcctgtgtccaaggtaaaatcgtgtttgtgtagttttcacaatgatgccatcatagatatagaacctgatctggaaaataatctagtaaaactttctagttatcatgtagtaagtgtcgattgtaacaaggaactgatgcctattaggacagatactactatttgtctaagtatagatcaaaagaaatcttacgtgtttaattttcacaagtatgaagaaaaatgttgtggtagaaccgtcattcatctagaatggttgttgggctttatcaagtgtattagtcagcatcagcatctggctattatgtttaaagatgacaatattattatgaagactcctggtaatactgatgcattttccagggaatattctatgactgaatgttctcaagaactacaaaagttttctttcaaaatagctatctcgtctctcaacaaactacgaggattcaaaaagagagtcaatgtttttgaaactagaatcgtaatggataatgacgataacattctaggaatgttgttttcggatagagttcaatcctttaagatcaacatctttatggcgtttttagattaatactttcaatgagataaatatgggtggcggagtaagtgttgagctccctaaacgggatccgcctccgggagtacccactgatgagatgttattaaacgtggataaaatgcatgacgtgatagctcccgctaagcttttagaatatgtgcatataggaccactagcaaaagataaagaggataaagtaaagaaaagatatccagagtttagattagtcaacacaggacccggtggtctttcggcattgttaagacaatcgtataatggaaccgcacccaattgctgtcgcacttttaatcgtactcattattggaagaaggatggaaagatatcagataagtatgaagagggtgcagtattagaatcgtgttggccagacgttcacgacactggaaaatgcgatgttgatttattcgactggtgtcagggggatacgttcgatagaaacatatgccatcagtggatcggttcagcctttaataggagtgatagaactgtagagggtcaacaatcgttaataaatctgtataataagatgcaaacattatgtagtaaagatgctagtgtaccaatatgcgaatcatttttgcatcatttacgcgcacacaatacagaagatagcaaagagatgatcgattatattctaagacaacagtctgcggactttaaacagaaatatatgagatgtagttatcccactagagataagttagaagagtcattaaaatatgcggaacctcgagaatgttgggatccagagtgttcgaatgccaatgttaatttcttactaacacgtaattataataatttaggactttgcaatattgtacgatgtaataccagcgtgaacaacttacagatggataaaacttcctcattaagattgtcatgtggattaagcaatagtgatagattttctactgttcccgtcaatagagcaaaagtagttcaacataatattaaacattcgttcgacctaaaattgcatttgatcagtttattatctcttttggtaatatggatactaattgtagctatttaaatgggtgccgcggcaagcatacagacgacggtgaatacactcagcgaacgtatctcgtctaaattagaacaagaagcgaacgctagtgctcaaacaaaatgtgatatagaaatcggaaatttttatatccgacaaaaccatggatgtaacctcactgttaaaaatatgtgctctgcggacgcggatgctcagttggatgctgtgttatcagccgctacagaaacatatagtggattaacaccggaacaaaaagcatacgtgccagctatatttactgctgcgttaaacattcagacgagtgtaaacactgttgttagagattttgaaaattatgtgaaacagacttgtaattctagcgcggtcgtcgataacaaattaaagatacaaaacgtaatcatagatgaatgttacggagccccaggatctccaacaaatttggaatttattaatacaggatctagcaaaggaaattgtgccattaaagcgttgatgcaattgacgactaaggccactactcaaatagcacctagacaagttgctggtacaggagttcagttttatatgattgttatcggtgttataatattggcagcgttgtttatgtactatgccaagcgtatgttgttcacatccaccaatgataaaatcaaacttattttagccaataaggaaaacgtccattggactacttacatggacacattctttagaacttctccgatggttattgctaccacggatatgcaaaactgaaaatatattgataatattttaatagattaacatggaagttatcgctgatcgtctagacgatatagtgaaacaaaatatagcggatgaaaaatttgtagattttgttatacacggtctagagcatcaatgtcctgctatacttcgaccattaattaggttgtttattgatatactattatttgttatagtaatttatatttttacggtacgtctagtaagtagaaattatcaaatgttgttggtggtgctagtcatcacattaactattttttattactttatactataatagtactagactgacttctaacaaacatctcacctgccataaataaatgcttgatattaaagtcttctatttctaacactattccatctgtggaaaataatactctgacattatcgctaattgacacatcggtgagtgatatgcctataaagtaataatcttctttgggcacatataccagtgtaccaggttctaacaacctatttactggtgctcctgtagcatactttttctttaccttgagaatatccatcgtttgcttggtcaatagcgatatgtgattttttatcaaccactcaaaaaagtaattggagtgttcatatcctctacgggctattgtctcatggccgtgtatgaaatttaagtaacacgactgtggtagatttgttctatagagccgattgccgcaaatagatagaactaccaatatgtctgtacaaatgttaaacattaattgattaacagaaaaaacaatgttcgttctgggaatagaaaccagatcaaaacaaaattcgttagaatatatgccacgtttatacatggaatataaaataactacagtttgaaaaataacagtatcatttaaacatttaacttgcggggttaatctcacaactttactgtttttgaactgttcaaaatatagcatcgatccgtgagaaatacgtttagccgcctttaatagaggaaatcccaccgcctttctggatctcaccaacgacgatagttctgaccagcaactcatttcttcatcatccacctgttttaacatataataggcaggagatagatatccgtcattgcaatattccttctcgtaggcacacaatctaatattgataaaatctccattctcttctctgcatttattatcttgtctcggtggctgattaggctgtggtcttggtttaggccttggtctatcgttgttgaatctattttggtcattaaatctttcatttcttcctggtatatttctatcacctcgtttggttggatttttgtctatattatcgtttgtaacatcggtacgggtattcatttatcacaaaaaaaacttctctaaatgagtctactgctagaaaacctcatcgaagaagataccatattttttgcaggaagtatatctgagtatgatgatttacaaatggttattgccggcgcaaaatccaaatttccaagatctatgctttctatttttaatatagtacctagaacgatgtcaaaatatgagttggagttgattcataacgaaaatatcacaggagcaatgtttaccacaatgtataatataagaaacaatttgggtctaggagatgataaactaactattgaagccattgaaaactatttcttggatcctaacaatgaagttatgcctcttattattaataatacggatatgactgccgtcattcctaaaaaaagtggtaggagaaagaataagaacatggttatcttccgtcaaggatcatcacctatcttgtgtattttcgaaactcgtaaaaagattaatatttataaagaaaatatggaatccgcgtcgactgagtatacacctatcggagacaacaaggctttaatatctaaatatgcgggaattaatgtcctgaatgtgtattctccttccacatccataagattgaatgccatttacggattcaccaataaaaataaactagagaaacttagtactaataaggaactagaatcgtatagttctagccctcttcaagaacccattaggttaaatgattttctgggactattggaatgtgttaaaaagaatattcctctaacagatattccgacaaaggattgattactataaatggagaatgttcctaatgtatactttaatcctgtgtttatagagcccacgtttaaacattctttattaagtgtttataaacacagattaatagttttatttgaagtattcgttgtattcattctaatatatgtattttttagatctgaattaaatatgttcttcatgcctaaacgaaaaatacccgatcctattgatagattacgacgtgctaatctagcgtgtgaagacgataaattaatgatctatggattaccatggatgacaactcaaacatctgcgttatcaataaatagtaaaccgatagtgtataaagattgtgcaaagcttttgcgatcaataaatggatcacaaccagtatctcttaacgatgttcttcgcagatgatgattcattttttaagtatttggctagtcaagatgatgaatcttcattatctgatatattgcaaatcactcaatatctagactttctgttattattattgatccaatcaaaaaataaattagaagctgtgggtcattgttatgaatctctttcagaggaatacagacaattgacaaaattcacagactttcaagattttaaaaaactgtttaacaaggtccctattgttacagatggaagggtcaaacttaataaaggatatttgttcgactttgtgattagtttgatgcgattcaaaaaagaatcctctctagctaccaccgcaatagatcctgttagatacatagatcctcgtcgtgatatcgcattttctaacgtgatggatatattaaagtcgaataaagtgaacaataattaattctttattgtcatcatgaacggcggacatattcagttgataatcggccccatgttttcaggtaaaagtacagaattaattagacgagttagacgttatcaaatagctcaatataaatgcgtgactataaaatattctaacgataatagatacggaacgggactatggacgcatgataagaataattttgaagcattggaagcaactaaactatgtgatgtcttggaatcaattacagatttctccgtgataggtatcgatgaaggacagttctttccagacattgtttaattctgtgagcgtatggcaaacgaaggaaaaatagttatagtagccgcactcgatgggacatttcaacgtaaaccgtttaataatattttgaatcttattccattatctgaaatggtggtaaaactaactgctgtgtgtatgaaatgctttaaggaggcttccttttctaaacgattgggtgaggaaaccgagatagagataataggaggtaatgatatgtatcaatcggtgtgtagaaagtgttacgtcggctcataatattatattttttatctaaaaaactaaaaataaacattgattaaattttaatataatacttaaaaatggatgttgtgtcgttagataaaccgtttatgtattttgaggaaattgataatgagttagattacgaaccagaaagtgcaaatgaggtcgcaaaaaaactgccgtatcaaggacagttaaaactattactaggagaattattttttcttagtaagttacagcgacacggtatattagatggtgccaccgtagtgtatataggatcggctcctggtacacatatacgttatttgagagatcatttctataatttaggagtgatcatcaaatggatgctaattgacggccgccatcatgatcctattttaaatggattgcgtgatgtaactctagtgactcggttcgttgatgaggaatatctacgatccatcaaaaaacaactgcatccttctaagattattttaatttctgatgtaagatccaaacgaggaggaaatgaacctagtacggcggatttactaagtaattacgctctacaaaatgtcatgattagtattttaaaccccgtggcatctagtcttaaatggagatgcccgtttccagatcaatggatcaaggacttttatatcccacacggtaataaaatgttacaaccttttgctccttcatattcagctgaaatgagattattaagtatttataccggtgagaacatgagactgactcgagttaccaaattagacgctgtaaattatgaaaaaaagatgtactaccttaataagatcgtccgtaacaaagtagttgttaactttgattatcctaatcaggaatatgactattttcacatgtactttatgctgaggaccgtgtactgcaataaaacatttcctactactaaagcaaaggtactatttctacaacaatctatatttcgtttcttaaatattccaacaacatcaactgaaaaagttagtcatgaaccaatacaacgtaaaatatctagcaaaaattctatgtctaaaaacagaaatagcaagagatccgtacgcggtaataaatagaaacgtactactgagatatactaccgatatagagtataatgatttagttactttaataaccgttagacataaaattgattctatgaaaactgtgtttcaggtatttaacgaatcatccataaattatactccggttgatgatgattatggagaaccaatcattataacatcgtatcttcaaaaaggtcataacaagtttcctgtaaattttctatacatagatgtggtaatatctgacttatttcctagctttgttagactagatactacagaaactaatatagttaatagtgtactacaaacaggcgatggtaaaaagactcttcgtcttcccaaaatgttagagacggaaatagttgtcaagattctctatcgccctaatataccattaaaaattgttagatttttccgcaataacatggtaactggagtagagatagccgatagatctgttatttcagtcgctgattaatcaattagtagagatgagataagaacattataataatcaataatatatcttatatcttatatcttatatcttatatcttgtttagaaaaatgctaatattaaaatagctaacgctagtaatccaatcggaagccatttgatatctataatagggtatctaatttcctgatttaaatagcggacagctatattctcggtagctactcgtttggaatcacaaacattatttacatctaatttactatctgtaatggaaacgtttcccaatgaaatggtacaatccgatacattgcattttgttatatttttttttaaagaggctggtaacaacgcatcgcttcgtttacatggctcgtaccaacaataatagggtaatcttgtatctattcctatccgtactatgcttttatcaggataaatacatttacatcgtatatcgtctttgttagcatcacagaatgcataaatttgttcgtccgtcatgataaaaatttaaagtgtaaatataactattatttttatagttgtaataaaaagggaaatttgattgtatactttcggttctttaaaagaaactgacttgataaaaatggctgtaatctctaaggttacgtatagtctatatgatcaaaaagagattaatgctacagatattatcattagtcatgttaaaaatgacgacgatatcggtaccgttaaagatggtagactaggtgctatggatggggcattatgtaagacttgtgggaaaacggaattggaatgtttcggtcactggggtaaagtaagtatttataaaactcatatagttaagcctgaatttatttcagaaattattcgtttactgaatcatatatgtattcactgcggattattgcgttcacgagaaccgtattccgacgatattaacctaaaagagttatcgggacacgctcttaggagattaaaggataaaatattatccaagaaaaagtcatgttggaacagtgaatgtatgcaaccgtatcaaaaaattactttttcaaagaaaaaggtttgtttcgtcaacaagttggatgatattaacgttcctaattctctcatctatcaaaagttaatttctattcatgaaaagttttggccattattagaaattcatcaatatccagctaacttattttatacagactactttcccatccctccgttgattattagaccggctattagtttttggatagatagtatacccaaagagaccaatgaattaacttacttattaggtatgatcgttaagaattgtaacttgaatgctgatgaacaggttatccagaaggcggtaatagaatacgatgatattaaaattatttctaataacactaccagtatcaatttatcatatattacatccggcaaaaataatatgattagaagttatatcgtcgcccgacgaaaagatcagaccgctagatctgtaattggtcccagtacatctatcaccgttaatgaggtaggaatgcccgcatatattagaaatacacttacagaaaagatatttgttaatgcctttacagtggataaagttaaacaactattagcgtcaaaccaagttaaattttactttaataaacgattaaaccaattaacaagaatacgccaaggaaagtttattaaaaataaaatacatttattgcctggtgattgggtagaagtagctgttcaagaatatacaagtattatttttggaagacagccgtctctacatagatacaacgtcatcgcttcatctatcagagctaccgaaggagatactatcaaaatatctcccggaattgccaactctcaaaatgctgatttcgacggggatgaggaatggatgatattagaacaaaatcctaaagctgtaattgaacaaagtattcttatgtatccgacgacgttactcaaacacgatattcatggagcccccgtttatggatctattcaagatgaaatcgtagcagcgtattcattgtttaggatacaagatctttgtttagatgaagtattgaacatcttggggaaatatggaagagagttcgatcctaaaggtaaatgtaaattcagcggtaaagatatctatacttacttgataggtgaaaagattaattatccgggtctcttaaaggatggtgaaattattgcaaacgacgtagatagtaattttgttgtggctatgaggcatctgtcattggctggactcttatccgatcataagtcgaacgtggaaggtatcaactttattatcaagtcatcttatgtttttaagagatatctatctatttacggttttggggtgacattcaaagatctgagaccaaattcgacgttcactaataaattggaggccatcaacgtagaaaaaatagaacttatcaaagaagcatacgccaaatatctcaacgatgtaagagacgggaaaatagttccattatctaaagctttagaggcggactatgtggaatccatgttatccaacttgacaaatcttaatatccgagagatagaagaacatatgagacaaacgctgatagatgatccagataataacctcctgaaaatggccaaagcgggttataaagtaaatcccacagaactaatgtatattctaggtacgtatggacaacaaaggattgatggtgaaccagcagagactcgagtattgggtagagttttaccttactatcttccagactctaaggatccagaaggaagaggttatattcttaattctttaacaaaaggattaacgggttctcaatattacttttcgatgctggttgcaagatctcaatctactgatatcgtctgtgaaacatcacgtaccggaacactggctagaaaaatcattaaaaagatggaggatatggtggtcgacggatacggacaagtagttataggtaatacgctcatcaagtacgccgccaattataccaaaattctaggctcagtatgtaaacctgtagatcttatctatccagatgagtccatgacttggtatttggaaattagtgctctgtggaataaaataaaacagggattcgtttactctcagaaacagaaacttgcaaagaagacattggcgccgtttaatttcctagtattcgtcaaacccaccactgaggataatgctattaaggttaaggatctgtacgatatgattcataacgtcattgatgatgtgagagagaaatacttctttacggtatctaatatagattttatggagtatatattcttgacgcatcttaatccttctagaattagaattacaaaagaaacggctatcactatctttgaaaagttctatgaaaaactcaattatactctaggtggtggaactcctattggaattatttctgcacaggtattgtctgagaagtttacacaacaagccctgtccagttttcacactactgaaaaaagtggtgccgtcaaacaaaaacttggtttcaacgagtttaataacttgactaatttgagtaagaataagaccgaaattatcactctggtatccgatgatatctctaaacttcaatctgttaagattaatttcgaatttgtatgtttgggagaattaaatccagacatcactcttcgaaaagaaacagataggtatgtagtagatataatagtcaatagattatacatcaagagagcagaaataaccgaattagtcgtcgaatatatgattgaacgatttatctcctttagcgtcattgtaaaggaatggggtatggagacattcattgaggacgaggataatattagatttactgtctatctaaatttcgttgaaccggaagaattgaatcttagtaagtttatgatggttcttccgggggcagccaacaagggaaagattagtaaattcaagattcctatctctgattatacgggttatgacgacttcaatcaaacaaaaaagctcaataagatgactgtagaactcatgaatctaaaagaattgggttctttcgatttggaaaacgtcaacgtgtatcctggagtatggaatacatacgatatcttcggtatcgaggccgctcgtgaatacttgtgcgaagccatgttaaacacctatggagaagggttcgattatctgtatcagccttgtgatcttctcgctagtttactatgtgctagttacgaaccagaatcagtgaataaattcaagttcggcgcagctagtactcttaagagagctacgttcggagacaataaagcattgttaaacgcggctcttcataaaaagtcagaacctattaacgataatagtagctgccacttttttagcaaggtccctaatataggaactggatattacaaatactttatcgacttgggtcttctcatgagaatggaaaggaaactatctgataagatatcttctcaaaagatcaaggaaatggaagaaacagaagacttttaattcttatcaataacatatttttctatgatctgtcttttaaacgatggattttccacaaatgcgcctctcaagtccctcatagaatgatacacgtataaaaaatatagcataggcaatgactccttatttttagacattagatatgccaaaatcatagccccgcttctatttactcccgcagcacaatgaaccaacacgggctcgtttcgttgatcacatttagataaaaaggcggttacgtcgtcaaaatatttactaatatcggtagttgtatcatctaccaacggtatatgaataatattaatattagagttaggtaatgtatatttatccatcgtcaaatttaaaacatatttgaacttaacttcagatgatggtgcatccatagcatttttataatttcccaaatacacattattggttacccttgtcattatagtgggagatttggctctgtgcatatctccagttgaacgtagtagtaagtatttatacaaacttttcttatccatttataacgtacaaatggataaaactactttatcggtaaacgcgtgtaatttagaatacgttagagaaaaggctatagtaggcgtacaagcagccaaaacatcaacacttatattctttgttattatattggcaattagtgcgctattactctggtttcagacgtctgataatccagtctttaatgaattaacgagatatatgcgaattaaaaatacggttaacgattggaaatcattaacggatagcaaaacaaaattagaaagtgatagaggtagacttctagccgctggtaaggatgatatattcgacttcaaatgtgtggatttcggcgcctattttatagctatgcgattggataagaaaacatatctgccgcaagctattaggcgaggtactggagacgcgtggatggttaaaaaggcggcaaaggtcgatccatctgctcaacaattttgtcagtatttgataaaacacaagtctaataatgttattacttgtggtaatgagatgttaaatgaattaggttatagcggttattttatgtcaccgcattggtgttccgattttagtaatatggaatagtgttagataaatgcggtaacgaatgttcctgtaaggaaccataacagcttagatttaacgttaaagatgagcataaacataataaacaaaattacaatcaaacctataacattaatatcaaacaatccaaaaaatgaaatcagtggagtagtaaacgcgtacataactcctggataacgtttagcagctgccgttcctattctagaccaaaaattcggtttcatgttttcgaaacggtattctgcaacaagtcgaggatcgtgttctacatatttggcggcgttatccagtatctgcctattgatcttcatttcgttttcgattctggctatttcaaaataaaatcccgatgatagacctccagactttataatttcatctacgatgttcagcgccgtagtaactctaataatataggctgataagctaacatcataccctcctgtatatgtgaatatggcatgatttttgtccattacaagctcggttttaactttattgcctgtaataatttctctcatctgtaggatatctatttttttgtcatgcattgccttcaagacgggacgaagaaacgtaatatcctcaataacgttatcgttttctacaataactacatattctacctttttattttctaactcggtaaaaaaattagaatcccatagggctaaatgtctagcgatatttcttttcgtttcctctgtacacatagtgttacaaaaccctgaaaagaagtgagtatacttgtcatcatttctaatgtttcctccagtccactgtataaacgcataatccttgtaatgatctggatcatccttgactaccacaacatttcttttttctggcataacttcgttgtcctttacatcatcgaacttctgatcattaatatgctcatgaacattaggaaatgtttctgatggaggtctatcaataactggcacaacaataacaggagttttcaccgccgccatttagttattgaaattaatcatatacaactctttaatacgagttatattttcgtctatccattgtttcacattgacatatttcgacaaaaagatataaaatgcgtattccaatgcttctctgtttaatgaattactaaaatatacaaacacgtcactgtctggcaataaatgatatcttagaatattgtaacaatttattttgtattgcacatgttcgtgatctatgagttcttcttcgaatggcataggatctccgaatctgaaaacgtataaataggagttagaataataatatttgagagtattggtaatatataaactctttagcggtataattagtttttttctctcaatttctatttttagatgtgatggaaaaatgactaattttgtagcattagtatcatgaactctaattaaaatcttaatatcttcgtcacacgttagctctttgaagtttttaagagatgcatcagttggttctacagatggagtaggtgcaacaattttttgttctacacatgtatgtactggagccattgttttaactataatggtgcttgtatcgaaaaactttaatgcagatagcggaagctcttcgccgcgactttctacgtcgtaattgggttctaacgccgatctctgaatggatactagttttctaagttctaatgtgattctctgaaaatgtaaatccaattcctccggcattatagatgtgtatacatcggtaaataaaactatagtatccaacgatcccttctcgcaaattctagtcttaaccaaaaaatcgtatataaccacggagatggcgtatttaagagtggattcttctaccgttttgttcttggatgtcatataggaaactataaagtccgcactactgttaagaatgattactaacgcaactatatagtttaaattaagcattttggaaacataaaataactctgtagacgatacttgactttcgaataagtttgcagacaaacgaagaaagaacagacctctcttaatttcagaagaaaactttttttcgtattcctgacgtctagagtttatatcaataagaaagttaagaattagtcggttaatgttgtatttcattacccaagtttgagatttcataatattatcaaaagacatgataatattaaagataaagcgctgactatgaacgaaatagctatatggttcgctcaagaatatagtcttgttaaacgtggaaacgataactgtatttttaatcacgtcagcggcatctaaattaaatataggtatatttattccacacactctacaatatgccacaccatcttcataataaataaattcgttagcaaaattattaattttagtgaaatagttagcgtcaactttcatagcttccttcaatctaatttgatgctcacacggtgcgaattccactctaacatcccttttccatgcctcaggttcatcgatctctataatatctagttttttgcgtttcacaaacacaggctcgtctctcgcgatgagatctgtatagtaactatgtaaatgataactagatagaaagatgtagctatatagatgacgatcctttaagagaggtataataactttaccccaatcagatagactgttgttatggtcttcggaaaaagaatttttataaatttttccagtattttccaaatatacgtacttaacatctaaaaaatccttaatgataataggaatggataatccgtctattttataaagaaatacatatcgcacattatacttttttttggaaatgggaataccgatgtgtctacataaatatgcaaagtctaaatattttttagagaatcttagttggtccaaattcttttccaagtacggtaatagatttttcatattgaacggtatcttcttaatctctggttctagttccgcattaaatgatgaaactaagtcactatttttataactaacgattacatcacctctaacatcatcatttaccagaatactgatcttcttttgtcgtaaatacatgtctaatgtgttaaaaaaaagatcatacaagttatacgtcatttcatctgtggtattcttgtcattgaaggataaactcgtactaatctcttctttaacagcctgttcaaatttatatcctatatacgaaaaaatagcaaccagtgtttgatcatccgcgtcaatattctgttctatcgtagtgtataacaatcgtatatcttcttctgtgatagtcgatacgttataaaggttgataacgaaaatatttttatttcgtgaaataaagtcatcgtaggattttggacttatattcgcgtctagtagatatgcttttatttttggaatgatctcaattagaatagtctctttagagtccatttaaagttacaaacaactaggaaattggtttatgatgtataatttttttagtttttatagattctttattctatacttaaaaaatgaaaataaatacaaaggttcttgagggttgtgttaaattgaaagcgagaaataatcataaattatttcattatcgcgatatccgttaagtttgtatcgtaatggcgtggtcaattacgaataaagcggatactagtagcttcacaaagatggctgaaatcagagctcatctaaaaaatagcgctgaaaataaagataaaaacgaggatattttcccggaagatgtaataattccatctactaagcccaaaaccaaacgagccactactcctcgtaaaccagcggctactaaaagatcaaccaaaaaggaggaagtggaagaagaagtagttatagaggaatatcatcaaacaactgaaaaaaattctccatctcctggagtcagcgacattgtagaaagcgtggccgctgtagagctcgatgatagcgacggggatgatgaacctatggtacaagttgaagctggtaaagtaaatcatagtgctagaagcgatctctctgacctaaaggtggctaccgacaatatcgttaaagatcttaagaaaattattactagaatctctgcagtatcgacggttctagaggatgttcaagcagctggtatctctagacaatttacttctatgactaaagctattacaacactatctgatctagtcaccgagggaaaatctaaagttgttcgtaaaaaagttaaaacttgtaagaagtaaatgcgtgcacttttttataaagatggtaaactctttaccgataataattttttaaatcctgtatcagacgataatccagcgtatgaggttttgcaacatgttaaaattcctactcatttaacagatgtagtagtatatgaacaaacgtgggaggaggcgttaactagattaatttttgtgggaagcgattcaaaaggacgtagacaatacttttacggaaaaatgcatgtacagaatcgcaacgctaaaagagatcgtatttttgttagagtatataacgttatgaaacgaattaattgttttataaacaaaaatataaagaaatcgtccacagattccaattatcagttggcggtttttatgttaatggaaactatgttttttattagatttggtaaaatgaaatatcttaaggagaatgaaacagtagggttattaacactaaaaaataaacacatagaaataagtcccgatgaaatagttatcaagtttgtaggaaaggacaaagtttcacatgaatttgttgttcataagtctaatagactatataaaccgctattgaaactgacggatgattctagtcccgaagaatttctgttcaacaaactaagtgaacgaaaggtatacgaatgtatcaaacagtttggtattagaatcaaggatctccgaacgtatggagtcaattatacgtttttatataatttttggacaaatgtaaagtccatatctcctcttccgtcaccaaaaaagttaatagcgttaactatcaaacaaactgctgaagtggtaggtcatactccatcaatttcaaaaagagcttatatggcaacgactattttagaaatggtaaaggataaaaattttttagatgtagtatctaaaactacgttcgatgaattcctatctatagtcgtagatcacgttaaatcatctacggatggatgatatagatctttacacaaataattacaagaccgataaatggaaatggataagcgtatgaaatctctcgcaatgacagctttcttcggagagctaaacacattagatattatggcattgataatgtctatatttaaacgccatccaaacaataccattttttcagtggataaggatggtcagtttatgattgatttcgaatacgataattataaggcttctcaatatttggatctgaccctcactccgatatttggagatgaatgcaagactcacgcatcgagtatagccgaacaattggcgtgtgcggatattattaaagaggatattagcgaatatatcaaaactactccccgtcttaaacgatttataaaaaaataccgcaatagatcagatactcgcatcagtcgagatacagaaaagcttaaaatagctctagctaaaggcatagattacgaatatataaaagacgcttgttaataagtaaatgaaaaaaaactagtcgtttataataaaacacgatatggatgccaacgtagtatcatcttctactattgcgacgtatatagacgctttagcgaagaatgcttcagaattagaacagaggtctaccgcatacgaaataaataatgaattggaactagtatttattaagccgccattgattactttgacaaatgtagtgaatatctctacgattcaggaatcgtttattcgatttaccgttactaataaggaaggtgttaaaattagaactaagattccattatctaaggtacatggtctagatgtaaaaaatgtacagttagtagatgctatagataacatagtttgggaaaagaaatcattagtgacggaaaatcgtcttcacaaagaatgcttgttgagactatcgacagaggaacgtcatatatttttggattacaagaaatatggatcctctatccgactagaattagtcaatcttattcaagcaaaaacaaaaaactttacgatagactttaagctaaaatattttctaggatccggtgcccaatctaaaagttctttattacacgctattaatcatccaaagtcaaggcctaatacatctctggaaatagaattcacacctagagacaatgaaacagttccatatgatgaactaataaaggaattgacgactctatcacgtcatatatttatggcttctccagagaatgtaattctttctccgcctattaacgcgcctataaaaacctttatgttgcctaaacaagatatagtaggtttggatctggaaaatctatatgccgtaactaagactgacggcattcctataactatcagagttacatcaaacgggttgtattgttattttacacatcttggttatattattagatatcctgttaagagaataatagattccgaagtagtagtctttggtgaggcagttaaggataagaactggaccgtatatctcattaagctaatagagcccgtgaatgctatcagtgatagactagaagaaagtaagtatgttgaatctaaactagtggatatttgtgatcggatagtattcaagtcaaagaaatacgaaggtccgtttactacaactagtgaagtcgtcgatatgttatctacatatttaccaaagcaaccagaaggtgttattctgttctattcaaagggacctaaatctaacattgattttaaaattaaaaaggaaaatactatagaccaaactgcaaatgtagtatttaggtacatgtccagtgaaccaattatctttggagaatcgtctatctttgtagagtataagaaatttagcaacgataaaggctttcctaaagaatatggttctggtaagattgtgttatataacggcgttaattatctaaataatatctattgtttggaatatattaatacacataatgaagtgggtattaagtccgtggttgtacctattaagtttatagcagaattcttagttaatggagaaatacttaaacctagaattgataaaaccatgaaatatattaactcagaagattattatggaaatcaacataatatcatagtcgaacatttaagagatcaaagcatcaaaataggagatatctttaacgaggataaactatcggatgtgggacatcaatacgccaataatgataaatttagattaaatccagaagttagttattttacgaataaacgaactagaggaccgttgggaattttatcaaactacgtcaagactcttcttatttctatgtattgttccaaaacatttttagacgattccaacaaacgaaaggtattggcgattgattttggaaacggtgctgacctggaaaaatacttttatggagagattgcgttattggtagcgacggatccggatgctgatgctatagctagaggaaatgaaagatacaacaaattaaactctggaattaaaaccaagtactacaaatttgactacattcaggaaactattcgatccgatacatttgtctctagtgtcagagaagtattctattttggaaagtttaatatcatcgactggcagtttgctatccattattcttttcatccgagacattatgctaccgtcatgaataacttatccgaactaactgcttctggaggcaaggtattaatcactaccatggacggagacaaattatcaaaattaacagataaaaagacttttataattcataagaatttacctagtagcgaaaactatatgtctgtagaaaaaatagctgatgatagaatagtggtatataatccatcaacaatgtctactccaatgactgaatacattatcaaaaagaacgatatagtcagagtgtttaacgaatacggatttgttcttgtagataacgttgatttcgctacaattatagaacgaagtaaaaagtttattaatggcgcatctacaatggaagatagaccgtctacaaaaaactttttcgaactaaatagaggagccattaaatgtgaaggtttagatgtcgaagacttacttagttactatgttgtttatgtcttttctaagcggtaaataataatatggtatgggttctgatatccccgttctaaatgcattaaataattccaatagagcgatttttgttcctataggaccttccaactgtggatactctgtattgttaatagatatattaatacttttgtcgggtaacagaggttctacgtcttctaaaaataaaagttttataacatctggcctgttcataaataaaaacttggcgattctatatatactcttattatcaaatctagccattgtcttatagatgtgagctactgtaggtgtaccatttgattttctttctaatactatatatttctctcgaagaagttcttgcacatcatctgggaataaaatactactgttgagtaaatcagttattttttttatatcgatattgatggacatttttatagttaaggataataagtatcccaaagtcgataacgacgataacgaagtatttatacttttaggaaatcacaatgactttatcagattaaaattaacaaaattaaaggagcatgtatttttttctgaatatattgtgactccagatacatatggatctttatgcgtcgaattaaatgggtctagttttcagcacggcggtagatatatagaggtggaggaatttatagatgctggaagacaagttagatggtgttctacatccaatcatatatctgaagatatacccgaagatatacacactgataaatttgtcatttatgatatatacacttttgattcgttcaagaataaacgattggtatttgtacaggtacctccgtcgttaggagatgatagtcatttgactaatccgttattgtctccgtattatcgtaattcagtagccagacaaatggtcaatgatatgatttttaatcaagattcatttttaaaatatttattagaacatctgattagaagccactatagagtttctaaacatataacaatagttagatacaaggataccgaagaattaaatctaacgagaatatgttataatagagataagtttaaggcgtttgtattcgcttggtttaacggcgtttcggaaaatgaaaaggtactagatacgtataaaaaggtatctaatttgatataatgaattcagtgactgtatcacacgcgccatatactattacttatcacgatgattgggaaccagtaatgagtcaattggtagagttttataacgaagtagccagttggctgctacgagacgagacgtcgcctattcctgataagttctttatacagttgaaacaaccgcttagaaataaacgagtatgtgtgtgcggtatagatccgtatccgaaagatggaactggtgtaccgttcgaatcaccaaattttacaaaaaaatcaattaaggagatagcttcatctatatctagattaaccggagtaattgattataaaggttataaccttaatataatagacggggttataccctggaattattacttaagttgtaaattaggagaaacaaaaagtcacgcgatctactgggataagatttccaagttactgctgcagcatataactaaacacgttagtgttctttattgtttgggtaaaacagatttctcgaatatacgggcaaagttagaatccccggtaactaccatagtcggatatcatccagcggctagagaccgccaattcgagaaagatagatcatttgaaattatcaacgttttactggaattagacaacaaggcacctataaattgggctcaagggtttatttattaatgctttagtgaaattttaacttgtgttctaaatggatgcggctattagaggtaatgatgttatctttgttcttaagactataggtgtcccgtcagcgtgcagacaaaatgaagatccaagatttgtagaagcatttaaatgcgacgagttagaaagatatattgagaataatccagaatgtacactattcgaaagtcttagggatgaggaagcatactctatagtcagaattttcatggatgtagatttagacgcgtatctagacgaaatagattatttaacggctattcaagattttattatcgaggtgtcaaactgtgtagctagattcgcgtttacagaatgcggcgccattcatgaaaatgtaataaaatccatgagatctaatttttcattgactaagtctacaaatagagataaaacaagttttcatattatctttttagacacgtataccactatggatacattgatagctatgaaacgaacactattagaattaagtagatcatctgaaaatccactaaccagatcgatagacactgccgtatataggagaaaaacaactcttcgggttgtaggtactaggaaaaatccaaattgcgacactattcatgtaatgcaaccaccgcatgataatatagaagattacctattcacttacgtggatatgaacaacaatagttattacttttctctacaacaacgattggaggatttagttcctgataagttatgggaaccagggtttatttcattcgaagacgctataaaaagagtttcaaaaatattcattaattctataataaactttaatgatctcgatgaaaataattttacaacggtaccactggtcatagattacgtaacaccttgtgcattatgtaaaaaacgatcgcataaacatccgcatcaactatcgttggaaaatggtgctattagaatttacaaaactggtaatccacatagttgtaaagttaaaattgttccgttggatggtaataaactgtttaatattgcacaaagaattttagacactaactctgttttattaaccgaacgaggagaccatatagtttggattaataattcatggaaatttaacagcgaagaacccttgataacaaaactaattttgtcaataagacatcaactacctaaggaatattcaagcgaattactctgtccgaggaaacgaaagactgtagaagctaacatacgagacatgttagtagattcagtggagaccgatacctatccggataaacttccgtttaaaaatggtgtattggacctggtagacggaatgttttactctggagatgatgctaaaaaatatacgtgtactgtatcaaccggatttaaatttgacgatacaaagttcgtcgaagacagtccagaaatggaagagttaatgaatatcattaacgatatccaaccattaacggatgaaaataagaaaaatagagagctatatgaaaaaacattatctagttgtttatgcggtgctaccaaaggatgtttaacattcttttttggagaaactgcaactggaaagtcgacaaccaaacgtttgttaaagtctgctatcggtgacctgtttgttgagacgggtcaaacaattttaacagatgtattggataaaggacctaatccatttatcgctaacatgcatttgaaaagatctgtattctgtagcgaactacctgattttgcatgtagtgggtcaaagaaaatcagatctgataatattaaaaagttgacagaaccttgtgtcattggaagaccgtgtttctccaataaaattaataatagaaaccatgcgacaatcattatcgatactaattacaaacctgtttttgataggatagataacgcattaatgagaagaattgccgtcgtgcgattcagaacacacttttctcaaccttctggtagagaggctgctgaaaataatgacgcgtacgataaagtcaaactattagacgaggggttagatggtaaaatacaaaataatagatatagattcgcatttctatacttgttggtgaaatggtacagaaaatatcatgttcctattatgaaactatatcctacacccgaagagattcctgactttgcattctatctcaaaataggtactctgttggtatctagctctgtaaagcatattccattaatgacggacctctccaaaaagggatatatattgtacgataatgtggtcactcttccgttgactactttccaacagaaaatatccaagtattttaattctagactatttggacacgatatagagagcttcatcaatagacataagaaatttgccaatgttagtgatgaatatctgcaatatatattcatagaggatatttcatctccgtaaatatatgctcatatatttatagaagatatcacatatctaaatgaataccggaatcatagatttatttgataatcatgttgatagtataccaactatattacctcatcagttagctactctagattatctagttagaactatcatagatgagaacagaagcgtgttattgttccatattatgggatcaggtaaaacaataatcgctttgttgttcgccttggtagcttccagatttaaaaaggtttacattctagtgccgaacatcaacatcttaaaaattttcaattataatatgggtgtagctatgaacttgtttaatgacgaattcatagctgagaatatctttattcattccacaacaagtttttattctcttaattataacgataacgtcattaattataacggattatctcgctacaataactctatttttatcgttgatgaggcacataatatctttgggaataatactggagaacttatgaccgtgataaaaaataaaaacaagattccttttttactattgtctggatctcccattactaacacacctaatactctgggtcatattatagatttaatgtccgaagagacgatagattttggtgaaattattagtcgtggtaagaaagtaattcagacacttcttaacgaacgcggtgtgaatgtacttaaggatttgcttaaaggaagaatatcatattacgaaatgcctgataaagatctaccaacgataagatatcacggacgtaagtttctagatactagagtagtatattgtcacatgtctaaacttcaagagagagattatatgattactagacgacagctatgttatcatgaaatgtttgataaaaatatgtataacgtgtcaatggcagtattgggacaacttaatctgatgaataatttagatactttatttcaggaacaggataaggaattgtacccaaatctgaaaataaataatggcgtgttatacggagaagaattggtaacgttaaacattagttccaaatttaaatactttattaatcggatacagacactcaacggaaaacattttatatacttttctaattctacatatggcggattggtaattaaatatatcatgctcagtaatggatattctgaatataatggttctcagggaactaatccacatatgataaacggcaaaccaaaaacatttgctatcgttactagtaaaatgaaatcgtctttagaggatctattagatgtgtataattctcctgaaaacgatgatggtagtcaattgatgtttttgttttcatcaaacattatgtccgaatcctatactctaaaagaggtaaggcatatttggtttatgactatcccagatactttttctcaatacaaccaaattcttggacgatctattagaaaattctcttacgccgatatttctgaaccagttaatgtatatcttttagccgccgtatattccgatttcaatgacgaagtgacgtcattaaacgattacacacaggatgaattaattaatgttttaccatttgacatcaaaaagctgttgtatctaaaatttaagacgaaagaaacgaatagaatatactctattcttcaagagatgtctgaaacgtattctcttccaccacatccatcaattgtaaaagttttattgggagaattggtcagacaatttttttataataattctcgtattaagtataacgataccaagttacttaaaatggttacatcagttataaaaaataaagaagacgctaggaattacatagatgatattgtaaacggtcacttctttgtatcgaataaagtatttgataaatctcttttatacaaatacgaaaacgatattattacagtaccgtttagactttcctacgaaccatttgtttggggagttaactttcgtaaagaatataacgtggtatcttctccataaaactgatgagatatataaagaaataaatgtcgagctttgttaccaatggatacctttccgttacattggaaccacacgagctgacgttagacataaaaactaatattaggaatgccgtatataagacgtatctccatagagaaattagtggtaaaatggccaagaaaatagaaattcgtgaagacgtggaattacctctcggcgaaatagttaataattctgtagttataaacgttccgtgtgtaataacctacgcgtattatcacgttggggatatagtcagaggaacattaaacatcgaagatgaatcaaatgtaactattcaatgtggagatttaatctgtaaactaagtagagattcgggtactgtatcatttagcgattcaaagtactgcttttttcgaaatggtaatgcgtatgacaatggcagcgaagtcactgccgttctaatggaggctcaacaaggtatcgaatctagttttgtttttctcgcgaatatcgtcgactcataaaaaagagaatagcggtaagtataaacacgaatactatggcaataattgcgaatgttttattctcttcgatatatttttgataatatgaaaaacatgtctctctcaaatcggacaaccatctcataaaatagttctcgcgcgctggagaggtagttgccgctcgtataatctctccagaataatatacttgcgtgtcgtcgttcaatttatacggatttctatagttctctgttatataatgcggtttgccctcatgattagacgacgacaatagtgttctaaatttagatagttgatcagaatgaatgtttattggcgttggaaaaattatccatacagcgtctgcagagtggttgatagttgttcctagatatgtaaaataatccaacttactaggcagcaaattgtctagataaaatactgaatcaaacggtgcagacgtattggcggatctaatggaatccaattgattaactatcttttgaaaatatacatttttatgatccaatacttgtaagaatatagaaataatgataagtccatcatcgtgtttttttgcctcttcataagaactatattttttcttattccaatgaacaagattaatctctccagagtatttgtacacatctatcaagtgattggatccataatcgtcttcctttccccaatatatatgtagtgatgataacacatattcattggggagaaaccctccacttatatatcctcctttaaaattaatccttactagttttccagtgttctggatagtggttggtttcgactcattataatgtatgtctaacggcttcaatcgcgcgttagaaattgcttttttagtttctatattaataggagatagttgttgcggcatagtaaaaatgaaatgataactgtttaaaaatagctcttagtatgggaattacaatggatgaggaagtgatatttgaaactcctagagaattaatatctattaaacgaataaaagatattccaagatcaaaagacacgcatgtgtttgctgcgtgtataacaagtgacggatatccgttaataggagctagaagaacttcattcgcgttccaggcgatattatctcaacaaaattcagattctatctttagagtatccactaaactattacggtttatgtactacaatgaactaagagaaatctttagacggttgagaaaaggttctatcaacaatatcgatcctcactttgaagagttaatattattgggtggtaaactagataaaaaggaatctattaaagattgtttaagaagagaattaaaagaggaaagtgatgaacgtataacagtaaaagaatttggaaatgtaattctaaaacttacaacacgggataaattatttaataaagtatatataagttattgcatggcgtgttttattaatcaatcgttggaggatttatcgcatactagtatttacaatgtagaaattagaaagattaaatcattaaatgattgtattaacgacgataaatacgaatatctgtcttatatttataatatgctagttaatagtaaatgaacttttacagatctagtataattagtcagattattaagtataatagacgactagctaagtctattatttgcgaggatgactctcaaattattacactcacggcattcgttaaccaatgcctatggtgtcataaacgagtatccgtgtccgctattttattaactactgataacaaaatattagtatgtaacagacgagatagttttctctattctgaaataattagaactagaaacatgtttagaaagaaacgattatttctgaattattccaattatttgaacaaacaggaaagaagtatactatcgtcatttttttctctagatccagctactactgataatgatagaatagacgctatttatccgggtggcatacccaaaaggggtgagaatgttccagagtgtttatccagggaaattaaagaagaagttaatatagacaattcttttgtattcatagacactcggttttttattcatggcatcatagaagataccattattaataaattttttgaggtaatcttctttgtcggaagaatatctctaacgagtgatcaaatcattgatacatttaaaagtaatcatgaaatcaaggatctaatatttttagatccgaattcaggtaatggactccaatacgaaattgcaaaatatgctctagatactgcaaaacttaaatgttacggccatagaggatgttattatgaatcattaaaaaaattaactgaggatgattgattaaaaaatataaattaatttaccatcgtgtatttttataacgggattgtccggcatatcatgtagatagttaccgtctacatcgtatactcgaccatctacgcctttaaatcctctatttattgacattaatctattagaattggaataccaaatattagtaccctcaattagtttattggtaatattttttttagacgatagatcgatggctcttgaaaccaaggttttccaaccggactcattgtcgatcggtgagaagtctttttcattagcatgaatccattctaatgatgtatgtttaaacactctaaacaattggacaaattcttttgatttgctttgaatgatttcaaataggtcttcgtctacagtaggcataccattagataatctagccattataaagtgcacgtttacatatctacgttctggaggagtaagaacgtgactattgagacgaatggctcttcctactatctgacgaagagacgcctcgttccatgtcatatctaaaatgaagatatcattaattgagaaaaaactaataccctcgcctccactagaagagaatacgcatgttttaatgcattctccgttagtgtttgattcttggttaaactcagccaccgccttgattctagtatcttttgttctagatgagaactctatattagagataccaaagactttgaaatatagtaataagatttctattcctgactgattaacaaatggttcaaagactagacatttaccatgggatgctaatattcccaaacatacatctataaatttgacgcttttctcttttaattcagtaaatagagagatatcagccgcactagcatcccctttcaatagttctccctttttaaaggtatctaatgcggatttagaaaactctctatctcttaatgaatttttaaaatcattatatagtgttgctatctcttgcgcgtattcgcccggatcacgattttgtctttcaggaaagctatcgaacgtaaacgtagtagccatacgtctcagaattctaaatgatgatatacctgtttttatttcagcgagtttagccttttgataaatttcttcttgctttttcgacatattaacgtatcgcattaatactgttttcttagcgaatgatgcagacccttctacgtcatcaaaaatagaaaactcgttattaactatatacgaacatagtcctcctagtttggagactaattctttttcatcgactagacgtttattctcaaatagtgattggtgttgtaaggatcctggtcgtagtaagttaaccaacatggtgaattcttgcacactattgacgataggtgtagccgataaacaaatcatcttatggttttttaacgcaatggtcttagataaaaaattatatactgaacgagtaggacggatcttaccatcttctttgattaatgatttagaaatgaagttatgacattcatcaatgatgacgcatattctactcttggaattaatagttttgatattagtaaaaaatttatttctaaaattttgatcatcgtaattaataaaaatacaatccttcgttatctctggagcgtatctgagtatagtgttcatccaaggatcttctatcaaagcctttttcaccaataagataatagcccaattcgtataaatatccttaagatgtttgagaatatatacagtagtcattgttttaccgacacccgtttcatggaacaataaaagagaatgcatactgtctaatcctaagaaaactcttgctacaaaatgttgataatccttgaggcgtactacgtccgaccccatcatttcaacgggcatattagtagttctgcgtaaggcataatcgatataggccgcgtgtgatttactcatttatgagtgataagtaataactatgttttaaaaatcacagcagtagtttaactagtcttctctgatgtttgttttcgatactttttgaatcagaagtcatactagaataaagcaacgagtgaacgtaatagagagcttcgtatactctattcgaaaactctaagaacttattaatgaattccgtatccactggattgtttaaaatactaaattgaacactgttcacatccttccaagaagaagacttagtgacggacttaacatgagacataaataaatccaaattttttttacaaacatcactagccaccataatggcgctatctttcaaccagctatcgcttacgcattttagcagtctaacatttttaaagagactacaatatattctcatagtatcgattacacctctaccgaataaagttggaagtttaataatacaatatttttcgtttacaaaatcaaataatggtcgaaacacgtcgaaggttaacatcttataatcgctaatgtatagattgttttcagtgagatgattattagatttaatagcatctcgttcacgtttgaacagtttattgcgtgcgctgaggtcggcaactacggcgtccgctttagtactcctcccataatactttacgctattaatctttaaaatttcatagactttatctagatcgctttctggtaacatgatatcatgtgtaaaaagttttaacatgtcggtcggcattctatttagatcattaactctagaaatctgaagaaagtaattagctccgtattccagactaggtaatgggcttttacctagagacagattaagttctggcaatgtttcataaaatggaagaaggacatgcgttccctcccggatattttttacaatttcatccatttacaactctatagtttgttttcattattattagttattatctcccataatcttggtaatacttaccccttgatcgtaagataccttatacaggtcattacatacaactaccaattgtttttgtacataatagattggatggttgacatccatggtggaataaactactcgaacagatagtttatctttccccctagatacattagccgtaatagttgtcggcctaaagaatatctttggtgtaaagttaaaagttagggttcttgttccattattgctttttgtcagtagttcattataaattctcgagatgggtccgttctctgaatatagaacatcatttccaaatctaacttctagtctagaaataatatcggtcttattcttaaaatctattcccttgatgaagggatcgttaatgaacaaatccttggcctttgattcggctgatctattatctccgttatagacgttacgttgactagtccaaagacttacaggaatagatgtatcgatgatgttgatactatgtgatatgtgagcaaagattgttctcttagtggcatcactatatgttccagtaatggcggaaaactttttagaaatgttatatataaaagaattttttcgtgttccaaacattagcagattagtatgaagataaacactcatattatcaggaacattatcaatttttacatacacatcagcatcttgaatagaaacgataccatcttctggaacctctacgatctcggcagactccggataaccagtcggtggaccatcgctaacaataactagatcatccaacaatctactcacatatgcatctatataatctttttcatcttgtgagtaccctggatacgaaataaatttattatccgtatttccataataaggtttagtataaacagagagcgatgttgccgcatgaacttcagttacagtcgccgttggttggtttatttgacctattactctcctaggtttctctataaacgatggtttaatttgtacattcttaaccatatatccaataaagctcaattcaggaacataaacaaattctttgttgaacgtttcaaagtcgaacgaagagtcacgaataacgatatcggatactggattgaaggtcaccgttacggtaatttttgaatcggatagtttaagactgctgaatgtatcttccacatcaaacggagttttaatataaacgtatactgtagatggttctttaatagtgtcattaggagttaggccaatagaaatatcattaagttcactagaatatccagagtgtttcaaagcaattgtattattgatacaattattatataattcttcgccctcaatttcccaaataacaccgttacacgaagagatagatacgtgattaatacatttatatccaacatatggtacgtaactgaatcttcccatacctttaacttctggaagttccaaactcagaaccaaatgattaagcgcagtaatatactgatccctaatttcgaagctagcgatagcctgattgtctggaccatcgtttgtcataactccggatagagaaatatattgcggcatatataaagttggaatttgactatcgactgcgaagacattagaccgtttaatagagtcatccccaccgatcaaagaattaatgatagtattattcattttctatttaaaatggaaaaagcttacaataaactccgtagagaaatatctataatttgtgagttttccttaaagtaacagcttccgtaaacgccgtctttatctcttagtaggtttattgtatttatgaccttttccttatcttcatagaatactaaaggcaacaaagaaatttttggttcttctctaagagctacgtgagacttaaccatagaagccaacgaatccctacatattttagaacagaaatacccaacttcaccacccttgtatgtctcaatactaataggtctaaaaaccaaatcttgattacaaaaccaacacttatcaattacactatttgtcttaatagacacatctgccatagatttataatactttggtagtatacaagcgagtgcttcttctttagcgggcttaaagactgctttaggtgctgaaataaccacatctggaaggcttactcgcttagccatttaattacggaactatttttttatacttctaatgagcaagtagaaaacctctcatctacaaaaacgtactcgtgtccataatcctctaccatagttacacgttttttagatctcatatgtgctaaaaagttttcccatactaattggttactattatttttcgtataatttttaacagtttgaggttttagatttttagttacagaagtgatatcgaatattttatccaaaaagaatgaataattaattgtcttagaaggagtgttttcttggcaaaagaataccaagtgcttaaatatttctactacttcattaatcttttctgtactcagattcagtttctcatcttttacttgattgattatttcaaagactaacttataatcctttttatttattctctcgttagccttaagaaaactagatacaaaatttgcatctacatcatccgtggatatttgatttttttccatgatatccaagagttccgagataatttctccagaacattgatgagacaataatctccgcaatacatttctcaaatgaataagtttattagacacgtggaagtttgactttttttgtacctttgtacatttttgaaataccgactcgcaaaaaatacaatattcatatccttgttcagatactataccgttatgtctacaaccgctacataatcgtagattcatgttaacactctacgtatctcgtcgtccaatattttatataaaaacattttatttctagacgttgccagaaaatcctgtaatatttttagttttttgggctgtgaataaagtatcgccctaatattgttaccgtcttccgccaatatagtagttaaattatccgcacatgcagaagaacaccgcttaggcggattcagtacaatgttatatttttcgtaccaactcatttaaatatcataatctaaaatagttctgtaatatgtctagcgctaatatattgatcataatcctgtgcataaattaagatacaacaatgtctcgaaatcatcgacatggcttcttccatagttagaagatcgtcgtcaaagttagcaacgtgattcatcaacatttgctgttttgaggcagcaaatactgaaccgtcgccattcaaccattcataaaaaccatcgtctgaatccattgataatttcttgtactggtttttgagagctcgcatcaatctagcatttctagctcccggattgaaaacagaaagaggatcgtacatccagggtccattttctgtaaatagaatcgtataatgtcccttcaagaagatatcagacgatccacaatcaaagaattggtctccgagtttgtaacaaactgcggactttaacctatacatgataccgtttagcataatttctggtgatacgtcaatcggagtatcatctattagagatctaaagccggtgtaacattctccaccaaacatattcttattctgacgtcgttctacataaaacatcattgctccattaacgataacaggggaatgaacagcactacccatcacattagttcccaatggatcaatgtgtgtaactccagaacatcttccatagcctatgttaggaggagcgaacaccactcttccactattgccatcgaatgccatagaataaatatccttggaattgatagaaatcggactgtcggatgttgtgatcatcttcataggattaacaactatgtatggtgccgcctgaagtttcatatcgtaactgatgccgtttataggtctagccacagaaaccaacgtaggtctaaatccaactatagacaaaatagaagccaatatctgttcctcatctgtcataacttgagagcatccagtatgaataatcttcattagatggggatctaccgcatcatcatcgttacaataaaaaattcccattctaatgttcataattgcttttctaatcatggtatgcatgtttgctctctgaatctctgtggaaattagatctgatacacctgtaatcactatcggattatcctccgtaagacgattaaccaacaacatataattataagactttacttttctaaattcataaagttgctggattaggctataggtgtctccatgtacatacgcgttctcgagcgcaggaagtttaataccgaatagtgccatcagaataggatgaatatagtaattagtttctggttttctataaataaaagacaaatcttgtgaactagacatatcggtaaaatgcatggattggaatcgtgtagtcgacagaagaatatgatgattagatggagagtatattttatctaactctttgagttggtcaccgattctaggactagctcgagaatgaataagtactaaaggatgagtacatttcacagaaacactagcattgttcaatgtgctctttacatgggtaaggagttgaaatagctcgtttctatttgttctgacaatatttagtttattcataatgttaagcatatcctgaatagtaaagttagatgtgtcatacttgttagtagttagatatttagcaattgcattcccatcatttctcaatctcgtactccaatcatgtgtagatgctacttcgtcgatggaaaccatacaatcctttttgataggctgttgagattgatcatttcctgcacgtttaggtttggtacgttgatttctagcccctgcggatataaagtcatcgtctacaatttgggacaatgaattgcatacactacaagacaaagatttatcagaagtgtgaatatgatcttcatctaccaaagaaagagtttgattagtataactagattttagtcctgcgttagatgttaaaaaaacatcgctattgaccacggcttccattatttatattcgtagtttttactcgaaagcgtgattttaatatccaatcttattacttttggaatcgttcaaaacctttgactagttgtagaatttgatctattgccctacgcgtatactcccttgcatcatatacgttcgtcaccagatcgtttgtttcggcctgaagttggtgcatatctctttcaacattcgacatgagatccttaagggccatatcgtctagattttgttgagatgctgctcctggatttggattttgttgtgctgttgtacatactgtaccaccagtaggtgtaggagtacatacagtggccacaataggaggttgagaaagtgtaaccgttggagtagtacaagaaatacttccatccgattgttgtgtacatgtagttgttggtaacgtctgagaaggttgggtagatggcggcgtcgtcgttttttgatctttattaaatttagagataatatcctgaacagcattgctcggcgtcaacgctggaaggagtgaactcgccggcgcatcagtatcttcagacagccaatcaaaaagattagacatatcagatgatgtattagtttgttgtcgtggttttggtgtaggagcagtactactaggtagaagaataggagccgatgtagctgttggaaccggctgtggagttatatgaatagttggttgtagcggttggataggctgtctgctggcggccatcatattatctctagctagttgttctcgcaactgtctttgataatacgactcttgagactttagtcctatttcaatcgcttcatcctttttcgtatccggatccttttcttcagaataatagattgacgactttggtgtagaggattctgccagcctctgtgagaacttgttaaagaagtccatttaaggctttaaaattgaattgcgattataagattaaatggcagacacagacgatattatcgactatgaatccgatgatctcaccgaatacgaggatgatgaagaagaggaagaagatggagagtcactagaaactagtgatatagatcccaaatcttcttataagattgtagaatcagcatccactcatatagaagatgcgcattccaatcttaaacatatagggaatcatatatctgctcttaaacgacgctatactagacgtataagtctatttgaaatagcgggtataatagcagaaagctataacttgcttcaacgaggaagattacctctagtttcagaattttctgacgaaacgatgaagcaaaatatgctacatgtaattatacaagagatagaggagggttcttgtcctatagtcatcgaaaagaacggagaattgttgtcggtaaacgattttgacaaagatggtctaaaattccatctagactatattatcaaaatttggaaacttcaaaaacgatattagaatttatacgaatatcgttctctaaatgtcacaatcaagtctcgcatgttcagcaatttattgtcgtactttatatcgtgttcattaacgatatcttgcaaaatagtaatgattctatcttccttcgatagatattcttcagagattattgtcttatattctttcttgttatcagatatgaatttgataagactttgaacattattgatacccgtctgtttaattttttctacagatattttagttttggcagattctatcgtatctgtcaatagacatccaacatcgacattcgacgtcaattgtctataaatcaacgtataaattttagaaataacattagcgaattgttgtgcgttgatgtcgttattctgaaacagtatgattttaggtagcattttcttaacaaagagaacgtatttattgttactcagttgaacagatgatatatccagattactaacgcatctgattccgtataccaaactttcagaagaaatggtatacaattgtttgtattcattcaatgtctctttttcagaaattagtttagagtcgaatactgcaataattttcaagagatagttttcatcagataagattttatttagtgtagatatgataaaactattgttttgttggagaacttgatacgccgcgttctctgtagtcgacgctctcaaatgggaaacaatctccattatttttttggaatcggatactatatcttcggtatcttgacgcagtctagtatacatagagttaagagagattagagtttgtacattaagcaacatgtctctaaatgtggctacaaacttttcctttttcacatcatctagtttattatataccgatttcacaacggcaccagatttaaggaaccagaatgaaaaactctgataactacaatatttcatcatagttacgattttatcatcttctatagttggtgtaatagcgcatacctttttctccaagactggaaccaacgtcataaaaatgtttaaatcaaaatccatatcaacatctgatgcgctaagaccagtctcgcgttcaagattatctttactaatggtgacgaactcatcgtataaaactctaagtttgtccattatttatttacagatttagttgtttaatttatttgtgctcttccagagttgggatagtatttttctaacgtcggtattatattattaggatctacgttcatatgtatcataatattaatcatccacgttttgataaatctatctttagcttctgaaataacgtatttaaacaaaggagaaaaatatttagctacggcatcagacgcaataacattttttgtaaatgtaacgtatttagacgacagatcttcgttaaaaagttttccatctatgtagaatccatcggttgttaacaccattcccgcgtcagattgaataggagtttgaatagtttgttttggaaatagatccttcaataacttatagttgggtgggaaaaaatcgattttatcactagactctttcttttttactatcattacctcatgaactatttcttgaatgagtatatgtattttctttcctatatcggacgcgttcattggaaaatataccatgtcgttaactataagaatatttttatcctcgtttacaaactgaataatatcagatgtagttcgtaaacgaactatatcatcaccagcacaacatctaactatatgatatccactagtttcctttagccgtttattatcttgttccatattagcagtcattccatcatttaagaaggcgtcaaagataatagggagaaatgacattttggattctgttacgactttaccaaaattaaggatatacggacttactatctttttctcaacgtcaatttgatgaacacacgatgaaaatgtgcttctatgagattgatcatgtagaaaacaacaagggatacaatatttccgcatatcatgaaatatattaagaaatcccaccttattatatttccccaaaggatccatgcacgtaaacattatgccgttatcattaataaagacttctttctcatcggatctgtaaaagttgttactgatttttttcattccaggatctagataattaataatgatgggttttctattcttattctttgtattttggcatatcctagaccagtaaacagtttccactttggtaaaatcagcagacttttgaacgctattaaacatggcattaatggcaataactaaaaatgtaaaatatttttctatgttaggaatatggtttttcactttaatagatatatggtttttggccaaaatgatagatatttttttatccgaggatagtaaaatattattagtcgccgtctctataaaaatgaagctagtctcgatatccaattttattctagaattgataggagtcgccaaatgtaccttatacgttatatctcccttgatgcgttccatttgtgtatctatatcggacacaagatctgtaaatagttttacgttattaatcatcacggtatcgccgtcgctagataacgctaatgtaccatccaagtcccaaatggagagatttaactgttcatcgtttagaataaaatgattaccggtcatattaataaagtgttcatcgtatctagataacaacgacttataattaatgtccaagtcttgaactcgctgaatgatcttttttaacccagttagttttagattggtacgaaatatattgttaaactttgattctacagtaatgtccaaatctagttgtggaaatacttccatcaacattgtttcaaacttgataatattattatctacatcttcgtacgatccaaattccggaatagatgtatcgcacgctctggccacccagataaccaaaaagtcacacgctccaggatatacattgtataaaaagctatcgttttttagtagggtttttttctgcgtgtatacgaagggattaaaaatagtattatcaacgtaactatattccaaattattcttatgagaatagataataatatcgtccttaatatctaacaaatttcctaaatatccctttaattgagtcattcgaagcgtcaatagaatatgtctcttaactatttccggctgttgtatatttaaatgacttcgtaaaaaataatatatgggcgacttctcatctatgtaatcatatggagtgagatatagggctcgttctacctcctgccccttacccacctgtaataccaattgcggacttactatatatcgcatatttatatcgtggggtaaagtgaaaatctactaccgatgatgtaagtcttacaatgttcgaaccagtaccagatcttaatttggaggcctccgtagaactaggggaggtaaatatagatcaaacaacacctatgataaaggagaatagcggttttatatcccgcagtagacgtctattcgcccatagatctaaggatgatgagagaaaactagcactacgattctttttacaaagactttattttttagatcatagagagattcattatttgttcagatgcgttgacgctgtaaaagacgtcactattaccaaaaaaaataacattatcgtggcgccttatatagcacttttaactatcgcatcaaaaggatgcaaacttacagaaacaatgattgaagcattctttccagaactatataatgaacatagtaagaaatttaaattcaactctcaagtatccatcatccaagaaaaactcggataccagtttggaaactatcacgtttatgattttgaaccgtattactctacagtagctctggctattcgagatgaacattcatctggcatttttaatatccgtcaagagagttatctggtaagttcattatctgaaataacatatagattttatctaattaatctaaaatctgatcttgttcaatggagtgctagtacgggcgctgtaattaatcaaatggtaaatactgtattgattacagtgtatgaaaagttacaactggtcatagaaaatgattcacaatttacatgttcattggctgtggaatcaaaacttccaataaaattacttaaagatagaaatgaattatttacaaaattcattaacgagttaaaaaagaccagttcattcaagataagcaaacgcgataaggatacgctactaaaatattttacttaggactggagttagaatttatagacgactcatttcgtttatcattgttactattattactattactatcattattagtgttggcattattagtattcttcttgtcatcttgttcagaaatatacagcaatgctatacctaatactaaatacattatcatgctcgcaatggctctaacaacaacgaaccaaaatgaatttggtcgtagcttttgttcacaaaaatacataaagaaatgtctacataaatctatggcgccattggctacttgaaatagcgccagtcctcctacagattttaatatagctgtataacatgacatttattcatcatcaaaagagacagagtcaccatctgtcatatttagattttttttcatgtgttcaaagtatcctctactcatttcattataatagtttatcatacttagaattttaggacggatcaatgagtaagacttgactagatcgtcagtagtaatttgtgcatcgtctattctgcatccgcttcgtcgaataatgtatagcatcgctttgagattctccatagctatcaagtctttatacaatgacatggaaatatctgtgaatactttatacttctccaacatcgatgccttaacatcatcgcctactttagcattgaaaatacgttctattgtgtagatggatgtagcaagatttttaaacaacaatgccatcttacacgatgattgcctcaagtctccaatcgtttgtttagaacgattagctacagagtccaatgcttggctgactagcatattattatctttagaaattgtattcttcaatgaggcgtttatcatatctgtgatttcgttagtcatattacagtctgactgggttgtaatgttatccaacatatcacctatggatacggtacacgtaccagcatttgtaataatcctatctaagatgttgtatggcattgcgcagaaaatatcttctcctgtaatatctccactctcgataaatctactcagattattcttaaatgccttattctctggagaaaagatatcagtgtccatcatttcattaatagtatacgcagaaaagataccacgagtatcaattctatccaagatacttatcggttccgagtcacagataatggtttcctctccttcgggagatcctgcatagaaatatctaggacaatagtttctatactgtctgtaactctgataatctctaaagtcactaactgataccatgaaattgagaagatcaaacgctgaagtaattaatttttctgcctcgtttttactacaactagttttcatcaatgtagtgacgatgtattgtttagttacttttggtctaatactgatgatagagatattattgcttcccataatggatcttctagtagtcaccttaaagcccattgatgcgaatagcagatagataaagtcttggtatgactcctttctaatatagtacggactacctttgtcacccaactttatacccacataagccataacaacctctttaatagccgtttcatgaggtttatcagccatgagcctgagtagttggaagaatctcatgaatcccgtctcagaaagtcctatatgcatgatagatttatctttcctgggaaactctcgtatagtcatagatgaaatactctttaaagtttctgaaataagattagtaacagtcttacctccgactactctaggtaacaaacaaactctaataggtgttttctctgcggagataatatcagaaaggatagagcaataagtagtattattgtgattataaagaccgaatacataacaggtagaatttataaacatcatgtcctgaaggtttttagacttgtattcctcgtaatccataccgtcccaaaacatggatttggtaactttgatagccgtagatctttgttccttcgccaacaggttaaagaaattaataaagaatttgttgtttctatttatgtccacaaattgcacgtttggaagcgccacggttacattcactgcagcattttgaggatcgcgagtatgaagtacgatgttattgtttactggtatatctggaaagaaatctaccagtctaggaataagagattgatatcgcatagaaatagtaaagtttataatctcatcatcgaagagcattttgttaccattgtaataaatatccactctgtcatatgtataaatgaagtactgttcaaacatgatgagatgtttatatgttggcatagtagtgagatcgacgtttggtaatggcaatgtattaagattaactccataatgtctagcagcatctgcgatgttataagcgtcgtcaaagcggggtcgatcttgtattgttatatattgtctaacacctataagattatcaaaatcttgtctgcttaatacaccgttaacaatttttgccttgaattcttttattggtgcattaataacatccttatagaggatgttaaacaaataagtgttatcaaagttaagatctggatatttcttttctgctagaacatccattgagtcggagccatctggtttaatataaccaccgataaatctagctctgtattctgtatccgtcaatctaatattaagaaggtgttgagtgaaaggtggaagatcgtaaaagctgtgagtattaatgataggattagtttccgaactaatgttaattggggtattaataatatctatatttccagcgttaagtgtaacattaaacagttttaattcacgtgacgtggtatcaattaaataattaatgcccaatttggatatagcagcctgaagctcatcttgtttagttacggatcctaatgagttattaagcaatatatcgaacggatgaacgaaggttgttttaagttggtcacatactttgtaatctagacatagatgcggaagaacggtagaaactatacgaaataaatattcagagtcctctaattgatcaagagtaactattgacttaataggcatcatttatttagtattaaatgacgaccgtaccagtgacggatatacaaaacgatttaattacagagttttcagaagataattatccatctaacaaaaattatgaaataactcttcgtcaaatgtctattctaactcacgttaacaacgtggtagatagagaacataatgccgccgtagtgtcatctccagaggaaatatcctcacaacttaatgaagatctatttccagatgatgattcaccggccactattatcgaacgagtacaacctcatactactattattgacgatactccacctcctacgtttcgtagagagttattaatatcggaacaacgtcaacaacgagaaaaaagatttaatattacagtatcgaaaaatgctgaagcaataatggaatctagatctatgataacttctatgccaacacaaacaccatccttgggagtagtttatgataaagataaaagaattcagatgttagaggatgaagtggttaatcttagaaatcaacgatctaatacaaaatcatctgataatttagataattttaccaaaatactatttggtaagactccgtataaatcaacagaagttaataagcgtatagccatcgttaattatgcaaatttgaacgggtctcccttatcagtcgaggacttggatgtttgttcggaggatgaaatagatagaatctataaaacgattaaacaatatcacgaaagtagaaaacgaaaaattatcgtcactaacgtgattattattgtcataaacattatcgagcaggcattgctaaaactcggatttgaagaaatcaaaggactgagtaccgatatcacttcagaaattatcgatgtggagatcggagatgactgcgatgctgtagcatcaaaactaggaatcggtaacagtccggttcttaatattgtattgtttatactcaagatattcgttaaacgaattaaaattatttaatttaatacattcccatatccagacaacaatcgtctggattaatctgttcctgtcgtctcataccggacgacatattaatctttttattagtgggcatctttttagatggtttctttttcccagcattaactgagtcgatacctagaagatcgtgattgatctctccgaccattccacgaacttctaattggccgtctctgacggtaccataaactattttaccagcattagtaacagcttggacaatctgaccatccatcgcattgtacgatgtagtagtaactgttgttctacgtctaggagcaccagaagtatttttggagcccttggatgttgatgtagaagaagacgaggattttgattttggtttacatgtaatacattttgaactctttgattttgtatcacatgcgccggcagtcacatctgtttgagaattaagattattgttgcctcctttgacggctgcatctccaccgatttgcgctagtagatttttaagctgtggtgtaatcttattaactgtttcgatataatcatcgtaactgcttctaacggctaaattttttttatccgccatttagaagctaaaaatatttttatttatgcagaagatttaactagattatacaatgaactaatatgatccttttccagattatttacaaacttggtattttttggttctggaggaggcgaatttaaattcggacttggattcggattttgtaagttcttgatcttattatacatcgagtataggatggcgacagtaactgctacacaaataccgatcaaaagaagaataccaatcatttattgacaataacttcactattgatcaagtatgcaatatatcatcttttcactaaataagtagtaataatgattcaacaatgtcgagatatatggacgataataatttagttcatggaaatatcgctatgattggtgtgaatgactccgctaactctgtggggtgcgcagtgctttccccacatagaataaattagcattccgactgtgataataataccaagtataaacgccataatactcaatactttccatgtacgagtgggactggtagacttactaaagtcaataaaggcgaagatacacgaaagaatcaaaagaatgattccagcgattagcacgccggaaaaataatttccaatcataagcatcatgtccatttaactaataaaaattttaaatcgccgaatgaacaaagtggaatataaaccatataaaaacaatagtttgtactgcaaaaataatatctatttttgttttcgaagatatggtaaaattaaatagtagtacacagcatgttataactaacagcagcaacggctcgtaattacttatcatttactagacgaaaaggtggtgggatattttcttgctcaaataatacgaatatatcacccatccattttatgcgatgtttatatactctaatctttaatagatctatagacgacgggtttaccaacaatatagattttatcgattcatctaatttaaacccttccttaaacgtgaatgatctattatctggcataacgatgaccctacctgatgaatcggacaatgtactgggccatgtagaataaattatcaacgaattatcgtctacgaacatttatatcatttgttttaattttaggacgcgaataaatggatataaaatagaaaataacagatattacaaccaatgttatggccgcgcccaaccaggtaggcagttttattttatcttttactacaggttctcctggatgtacgtcaccaacggcggacgtagttctagtacaattagacgtaagttccgcttgggaattttttaacgctaaagagttaacgttaatcgtgcacccaacgtatttacatctagttcgttgaacatcttgattataatataaccattttctatctctagattcgtcagtgcactcatgtaaccaacataccctaggtcctaaatatttatctccggaattagattttggataattcgcgcaccaacaatttctatttcctttatgatcgttacaaaagacgtataatgccgtatccccaaaagtaaaataatcaggacgaataattctaataaactcagaacaatatctcgcatccatatgtttggagcaaatatcggaataagtagacatagccggtttccgttttgcacgtaaccattctaaacaattggggtttccaggatcgtttctacaaaatccagtcatgaaatcgtcacaatgttctgtcttgtaattattattaaatatttttggacagtgtttggtatttgtcttagaacaacattttgccacgctatcactatcgcccaggagataatccttttttataaaatgacatcgttgcccggatgctatataatcagtagcgtgttttaaatccttaatatattcaggagttacctcgttctgataatagattaatgatccaggacgaaatttgaaagaactacatggttctccatgaattaatacatattgtttagcaaattcaggaactataaaactactacaatgatctatcgacataccatctatcaaacaaaacttgggtttaatttctcccggagatgtttcataatagtacgtataactttcttctgcaaacttaacagctctattatattcaggataattaaaacctaattccatatatttgtctcgtatatctgctattcctggtgctattttgattctattaagagtaacagctgcccccattcttaataatcgtcagtatttaaactgttaaatgttggtatatcaacatctaccttatttcccgcagtataaggtttgttgcaggtatactgttcaggaatggttacatttatacttcttctatagtcctgtctttcgatgttcatcacatatgcaaagaacagaataaacaaaataatgtaagaaataatattaaatatctgtgaattcgtaaatacattgattgccataataattacagcagctacaatacacacaatagacattcccacagtgttgccattacctccacgatacatttgagttactaagcaataggtaataactaagctagtaagaggcaatagaaaagatgagataaatatcatcaatatagagattagaggagggctatatagagccaagacgaacaaaatcaaaccgagtaacgttctaacatcattatttttgaagattcccaaataatcattcattcctccataatcgttttgcatcatacctccatctttaggcataaacgattgctgctgttcctctgtaaataaatctttatcaagcactccagcacccgcagagaagtcgtcaagcatattgtaatatcttaaataactcatttatatattaaaaaatgtcactattaaagatggagtataatctttatgccgaactaaaaaaaatgacttgtggtcaacccctaagtctttttaacgaagacggggatttcgtagaagttgaaccgggatcatcctttaagtttctgatacctaagggattttacgcctctccttccgtaaagacgagtctagtattcgagacattaacaacgaccgataataaaatcactagtatcaatccaacaaatgcgccaaagttatatcctcttcaacgcaaagtcgtatctgaagtagtttctaatatgaggaaaatgatcgaatcaaaacgtcctctatacattactcttcacttggcgtgtggatttggtaagactattaccacgtgttatcttatggctacacacggtagaaaaaccgtcatttgcgtacccaataaaatgttaatacatcaatggaagacacaggtagaggcagtcggattggaacataagatatccatagatggagtaagtagtctattaaaggaactaaagactcaaagtccggatgtattaatagtagtcagtagacatctgacaaacgatgccttttgtaaatatatcaataagcattatgatttgttcatcttggatgaatcacatacgtataatctgatgaacaatacagcagttacaagatttttagcgtattatcctccgatgatgtgttattttttaactgctacacctagaccatctaaccgaatttattgtaacagtattattaatattgccaagttatccaatctaaaaaaaactatctatgcagtagatagtttttttgagccatattccacagataatattagacatatggtaaaacgactagatggaccatctaataaatatcatatatataccgagaagttattatctgtagacgagcctagaaatcaacttattcttgataccctggtagaagaattcaagtcaggaactattaatcgcattttagttattactaaactacgtgaacatatggtattattctacaaacgattattagattttttcggaccagaggttgtatttataggagacgcccaaaatagacgtactccagatatggtcaaatcaatcaaggaactaaatagatttatattcgtatccaccttattttattccggtactggtttagatattcctagtttggattcgttgttcatttgctcggcagtaatcaacaatatgcaaatagagcaattactagggagggtatgtcgagaaacagaactattagataggacggtatatgtatttcctaacacatccatcaaagaaataaagtacatgataggaaatttcatgcaacgaattattagtctgtctgtagataaactaggatttaaacaaaaaagttatcggaaacatcaagaatccgatcccacttctgcatgtacaacatcatccagagaagaacgtgtattaaatagaatatttaactcgcaaaatcgttaagaagtttaagcgacgatccgcatgctgcgcaggccagtgtattacccctcatagtattaatataatccaatgatacttttgtgatgtcggaaatcttaaccaatttagactgacaggcagaacacgtcatgcaatcatcatcgtcatcgataactgtagtcttgggcttctttttgcgactcttcattccggaacgcacattggtgctatccatttaggtagtaaaaaataagtcagaatatgccctataacacgatcgtgcaaaacctggtatatcgtctctatctttatcacaatatagtgtatcgacatttttattattattgacctcgtttatcttggaacatggaatgggaacatttttgttatcaacggccatctttgccttaattccagatgttgtaaaattataactaaacagtctatcatcgacacaaatgaaattcttgtttagacgtttgtagtttacgtatgcggctcgttcgcgtctcattttttcagatattgcaggtactataatattaaaaataagaatgaaataacataggattaaaaataaagttatcatgacttctagcgctgatttaactaacttaaaagaattacttagtctgtacaaaagtttgagattttcagattctgcggctatagaaaagtataattctttggtagaatggggaacatctacttactggaaaataggcgtgcaaaaggtagctaatgtcgagacgtcaatatctgattattatgatgaggtaaaaaataaaccgtttaatattgatccgggctattacattttcttaccggtatattttgggagcgtctttatttattcgaagggtaaaaatatggtagaacttggatctggaaactcttttcaaataccagatgatatgcgaagtgcgtgtaacaaagtattagacagcgataacggaatagactttctgagatttgttttgttaaacaatagatggataatggaagatgctatatcaaaatatcagtctccagttaatatatttaaactagctagtgagtacggattaaacatacccaaatatttagaaattgaaatagaggaagacacattatttgacgacgagttatactctattatagaacgctctttcgatgataaatttccaaaaatatccatatcgtatattaagttgggagaacttagacggcaagttgtagactttttcaaattctcattcatgtatattgagtccatcaaggtagatcgtataggagataatatttttattcctagcgttataacaaaatcaggaaaaaagatattagtaaaagatgtagaccatttaatacgatccaaggttagagaacatacatttgtaaaagtaaaaaagaaaaacacattttccattttatacgactatgatggaaacggaacagaaactagaggagaagtaataaaacgaattatagacactataggacgagactattatgttaacggaaagtatttctctaaggttggtagtgcaggcttaaagcaattgactaataaattagatattaatgagtgcgcaactgtcgatgagttagttgatgagattaataaatccggaactgtaaaacgaaaaataaaaaaccaatcagcatttgatttaagcagagaatgtttgggatatccagaagcggattttataacgttagttaataacatgcggttcaaaatagaaaattgtaaggttgtaaatttcaatattgaaaatactaattgtttaaataacccgagtattgaaactatatatggaaactttaaccagttcgtctcaatctttaatgtcgtcaccgatgtcaaaaaaagattattcgagtgaaataatatgcgcctttgatataggtgcaaaaaatcctgccagaactgttttagaagtcaaggataactccgttagggtattggatatatcaaaattagactggagttctgattgggaaaggcgcatagctaaagatttgtcacaatatgaatacactacagttcttctagaacgtcagcctagaaggtcgccgtatgttaaatttatctattttattaaaggctttttatatcatacatcggctgccaaagttatttgcgtctcgcctgtcatgtctggtaattcatatagagatcgaaaaaagagatcggtcgaagcatttcttgattggatggacacattcggattgcgagactccgttccggatagacgcaaattagacgatgtagcggatagtttcaatttggctatgagatacgtattagataaatggaatactaattatacaccttataataggtgtaaatctagaaattacataaaaaaaatgtaataacgttagtaacgccattatggataatctatttacctttctacatgaaatagaagatagatatgccagaactatttttaactttcatctaataagttgcgatgaaataggagatatatatggtcttatgaaagaacgcatttcctcagaggatatgtttgataatatagtgtataataaagatatacatcctgccattaagaaactagtgtattgcgacatccaacttactaaacacattattaatcagaatacgtatccggtatttaacgattcttcacaagtgaaatgttgtcattatttcgacataaactcagataatagcaatattagctctcgtacagtagagatatttgagagggaaaagtcatctcttgtatcatatattaaaactaccaataagaagagaaaggtcaattacggcgaaataaagaaaactgttcatggaggcactaatgcaaattacttttccggtaaaaagtctgacgagtatctgagtactacagttagatccaacattaatcaaccttggatcaaaaccatctctaagaggatgagagttgatatcattaatcactctatagtaacgcgtggaaaaagctctatattacaaactatagaaattatttttactaatagaacatgtgtgaaaatattcaaggattctactatgcacattattctatccaaggacaaggatgaaaaggggtgtatacacatgattgacaaattattctatgtctattataatttatttctgttgttcgaagatatcatccaaaacgagtactttaaagaagtagctaatgttgtaaaccacgtactcacggctacggcattagatgagaaattattcctaattaagaaaatggctgaacacgatgtttatggagttagcaatttcaaaatagggatgtttaacctgacatttattaagtcgttggatcataccgttttcccctctctgttagatgaggatagcaaaataaagttttttaaggggaaaaagctcaatattgtagcattacgatctctggaggattgtataaattacgtgactaaatccgagaatatgatagaaatgatgaaggaaagatcgactattttaaatagcatagatatagaaacggaatcggtagatcgtctaaaagaattgcttctaaaatgaaaaaaaacactaattcagaaatggatcaacgactagggtataagtttttggtgcctgatcctaaagccggagttttttatagaccgttacatttccaatatgtatcgtattctaattttatattgcatcgattgcatgaaatcttgaccgtcaagcggccactcttatcgtttaagaataatacagaacgaattatgatagaaattagcaatgttaaagtgactcctccagattactcacctataatcgcgagtattaaaggtaagagttatgacgcattagccacgttcactgtaaatatctttaaagaggtaatgaccaaagagggtatatccatcactaaaataagtagttatgagggaaaagattctcatttgataaaaattccgctactaataggatacgggaataaaaatccacttgatacagccaagtatcttgttcctaatgtcataggtggagtctttatcaataaacaatctgtcgaaaaagtaggaattaatctagtagaaaagattacaacatggccaaaatttagggttgttaagccaaactcattcactttctcgttttcctccgtatcccctcctaatgtattaccgacaagatatcgccattacaagatatctctggatatatcacaattggaagcgttgaatatatcatcgacaaagacatttataacggtcaatattgttttgctgtctcaatatttatctagagtgagtctagaattcattagacgtagtttatcatacgatatgcctccagaagttgtctatctagtaaacgcgataatagatagtgctaaacgaattactgaatctattactgactttaatattgatacatacattaatgacctggtggaagctgaacacattaaacaaaaatctcagttaacgattaacgagttcaaatatgaaatgctgcataactttttacctcatatgaactatacacccgatcaactaaagggattttatatgatatctttactaagaaagtttctctactgtatcttccacacttctagatatccagatagagattcgatggtttgtcatcgcatcctaacgtacggcaaatattttgagacgttggcacatgatgaattagagaattacataggcaacatccgaaacgatatcatgaacaatcacaagaacagaggcacttacgcggtaaacattcatgtactaacaactcccggacttaatcatgcattttctagtctattgagtggaaagttcaaaaagtcagacggtagttatcgaacacatcctcactattcatggatgcagaatatttctattcctaggagtgttggattttatccggatcaagtaaagatttcaaagatgttttctgtcagaaaataccatccaagtcaatatctttacttttgttcatcagacgttccggaaagaggtcctcaggtaggtttagtatctcaattgtctgtcttgagttccattacaaatatactaacgtctgagtatttggatttggaaaagaaaatttgtgagtatatcagatcatattataaagatgatataagttactttgaaacaggatttccaatcactatagaaaatgctctagtcgcatctcttaatccaaatatgatatgtgattttgtaactgactttagacgtagaaaacggatgggattcttcggtaacttggaggtaggtattactttagttagggatcacatgaatgaaattcgcattaatattggagcaggaagattagtcagaccattcttggttgtggataacggagagctcatgatggatgtgtgtccggagttagaaagcagattagacgacatgacattctctgacattcagaaagagtttccgcatgtcattgaaatggtagatatagaacaatttacttttagtaacgtatgtgaatcggttcaaaaatttagaatgatgtcaaaggatgaaagaaagcaatacgatttatgtgactttcctgccgaatttagagatggatatgtagcatcttcactagtgggaatcaatcacaattctggacccagagctattcttggatgtgctcaagctaaacaagctatctcttgtctgagctcggatatacgaaataaaatagacaatggaattcatttgatgtatccagagaggccaatcgtgattagtaaggctttagaaacttcaaagattgcggctaattgcttcggccaacatgttactatagcattaatgtcgtacaaaggtatcaatcaagaggatggaattatcatcaaaaaacaatttattcagagaggcggtctcgatattgttacagccaagaaacatcaagtagaaattccattggaaaactttaataacaaagaaagagataggtctaacgcctattcaaaattagaaagtaatggattagttagactgaatgctttcttggaatccggagacgctatggcacgaaatatctcatcaagaactcttgaagatgattttgctagagataatcagattagcttcgatgtttccgagaaatataccgatatgtacaaatctcgcgttgaacgagtacaagtagaacttactgacaaagttaaggtacgagtattaaccatgaaagaaagaagacccattctaggagacaaatttaccactagaacgagtcaaaagggaacagtcgcgtatgtcgcggatgaaacggaacttccatacgacgaaaatggtatcacaccagatgtcattattaattctacatccatcttctctagaaaaactatatctatgttgatagaagttattttaacagccgcatattctgctaagccgtacaacaataagggagaaaaccgacctgtctgttttcctagtagtaacgaaacatccatcgatacatatatgcaattcgctaaacaatgttatgagcattcaaatccgaaattgtctgatgaagaattatcggataaaatcttttgtgaaaagattctctatgatcctgaaacggataagccttatgcatccaaagtattttttggaccaatttattacttgcgtctgagacatttaactcaggacaaggcaaccgttagatgtagaggtaaaaagacgaagctcattagacaggcgaatgagggacgaaaacgtggaggaggtatcaagttcggagaaatggagagagactgtttaatagcgcatggtgcagccaatactattacagaagttttgaaagattcggaagaagattatcaagatgtgtatgtttgtgaaaattgtggagacatagcagcacaaatcaagggtattaatacatgtcttagatgttcaaaacttaatctctctcctctcttaacaaaaattgataccacgcacgtatctaaagtatttcttactcaaatgaacgccagaggcgtaaaagtcaaattagatttcgaacgaaggcctccttcgttttataaaccattagataaagttgatctcaagccgtcttttctggtgtaatattctagtttggtagtagatacatatcaatatcatcaaattcgagatccgaattataaaatgggcgtggattgttaactatagaatcggacgtctgatattcgaaaatctgtggagtttcaggttttggtggaggtgtaactgctacttgggatactgaagtctgatattcagaaagctgtggatgttctggttcggcatccaccgatggtgtcacatcactaatcggttcggtaacgtctgtggatggaggtgctacttctacagaacctgtagcctcagttgtcaacggagatacatttttaatgcgagaaaatgtataatttggtaatggtttcttatgtggatctgaagaagaggtaagatatctactagaaagataccgatcacgttctagttctcttttgtagaacttaactttttctttctccgcatctagttgatattccaacctcttcacgttactacgttcagattccaattcacgttcgcatgggttacctccgcagtttttacgagcgatttcacgttcagccttcatgcgtctctccctctctctatcgagtttatcagagcagtctttctgaaggcgatcgaactccataaatttctccaacgctttgattgtttccatagatttccgaagttcagcttttaggactgtgattctttttctttcgaattcacagctggatgtacaaccgtttccattaccgccatctctaagtttcttttctagatcggcaacatttcatccccatgccttttacattcctcgagtctactgtcgtcgaaatatcgttccagctccttttcgacatcaataactttagcacgttgtctctcaagctctcttttgtagttatctgattccctggcacgtttaagatcttcatgcaattgagtcagctcttaacttcctctcttgcttcttcgtcatagtacgcgcaatcactgtgagatccattgttaccacgtctacactcggcgagctcgcgtttaagagattcaatttcccgtttgtattggtccatgtttccattgctaccaccattagatttacaggctgctagttgtcgttcgagatcagaaatacgggttttcttggaattgatttcgtcgatgtacttggcatcgaaacacttattaagttctttttccaattctacgattttatttctttcgcgagtcaattccctcctgtagtaactatctgttttgtcagattcacgctctctacgtagactttcttgcaagttactaatttgttccctagcacgtccgagtttagttttatatgctgaatagagttctgattcatcctttgagcagatctctagcgatcgtttaagattcctaattctagtctttagcctatttacctcctcagaagatgttccgttaccgttgcgtttacactcgttaagctgtctatcaagatccatgattctatctctaagacgttgcatctctctttccatatcagcattgctttcattattacgtctgcagtcactcaactgtctttcaatatctgagattctatctctaagacgtcgcatctctctctgtttcggcattggtttcattattacgtttacagtcgttcaactgtctttcaagatctgatattctagattggagtctgctaatctctgtagcattttcacggcattcactcagttgtctttcaagatctgaaattttagattggagtctgctaatctctgtaagatttcctcctccgctctcgatgcagtcggtcaacttattctctagttctctaatacgcgaacgcagtgcatcaacttcttgcgtgtcttcctggttgcgtgtacattcatcgagtctagattcgagatctctaacgcgtcgtcgttcttcctcaagttctctgcgtactacagaaagcgtgtccttatcttgttgatatttagcaatttctgattctagagtactgattttgcttacgtagttactaatatttgtcttggccttatcaagatcctccttgtatttgtcgcattccttgatatccctacgaagtctggacagttcccattcgacattacgacgtttatcgatttcagctcggagatcgtcatcgcgttgttttagccacatacgactgagttcaagttctcgttgacaagatccatctacttttccattcctaatagtatccagttccttttctagttctgaacgcatttctcgttccctatcaagcgattctctcaattctcggatagtcttcttatcaatttctaataaatctgaaccatcatctgtcccattttgaatatccctgtgttctttgatctcttttgtaagtcggtcgattctttcggttttataaacagaatccctttccaaagtcctaatcttactgagtttatcactaagttctgcattcaattcggtgagttttctcttggcttcttccaactctgttttaaactctccactatttccgcattcttcctcgcatttatctaaccattcaattagtttattaataactagttggtaatcagcgattcctatagccgttcttgtaattgtgggaacataattaggatcttctaatggattgtatggcttgatagcatcatctttatcattattagggggatggacaaccttaattggttggtcctcatctcctccagtagcgtgtggttcttcaataccagtgttagtaataggcttaggcaaatgcttgtcgtacgcgggcacttcctcatccatcaagtatttataatcgggttctacttcagaatattcttttctaagagacgcgacttcgggagttagtagaagaactctgtttctgtatctatcaacgctggaatcaatactcaagttaaggatagcgaatacctcatcgtcatcatccgtatcttctgaaacaccatcatatgacatttcatgaagtctaacgtattgataaatagaatcagatttagtattaaacagatccttaacctttttagtaaacgcatatgtatattttagatctccagatttcataatatgatcacatgccttaaatgtcagtgcttccatgatataatctggaacactaatgggtgacgaaaaagatacagcaccatatgctacgttgataaataaatctgaaccactaagtagataatgattaatgttaagaaagaggaaatattcagtgtataggtatgtcttggcgtcatatcttgtactaaacacgctaaacagtttgttaatgtgatcaatttccaatagattaattagagcagcgggaataccaacaaacatattaccacatccgtattttctatgaatatcacatatcatgttaaaaaatcttgatagaagagcgaatatctcgtctgacttaatgagtcgtagttcagcagcaacataagtcataactgtaaatagaacatactttcctgtagtgttgattctagactccacatcaacaccattattaaaaatagttttatatacatctttaatctgctctccgttaatcgtcgaacgttctagtatacggaaacactttgatttcttatctgtagttaatgacttagtgatatcacgaagaatattacgaattacatttcttgtttttcttgagagacctgattcagaactcaactcatcgttccatagtttttctacctcagtggcgaaatctttggagtgcttggtacatttttcaataaggttcgtgacctccatttattataaaaaatttattcaaaacttaactacaatcgggtaattataaaatcgtagatctcccatgtggcggaatactaccatctatcgcatgtggatggacagtaggtaatggccatgggaacagtaatgtttgcatatttatctttcttgccagtattactgcatattgtcccaatgtttcgatgtgatgttctaacctatcaactgccgctgtatcacaacaatagtgtccgatgaaattaagattatgatccaatgtgtttaatatatgattatcaagtcttatacgatccgcgtcttttttgacaggatcaggttcttctacaggaagaagtttcggcctcttatgatattcatgtctgggaaacggtggtctagggtgaggctccggtatcggagtgggttttggattataatcatcatcgtctatgacatcatcttcgacttcgatatttattttgctatcttgatgatgtcctgtatcagttgcattttcagcactcgactgaatattagcgcattcattgtctattattaccatatttctaaacccaaaatgtatgtgttgaacatcagtactatcgttgatgagtcttatagcatgaattcgcttatcgttatcgggtttatcttctgtcaccttagcaattccttttttattaaactctacataatcatatccatttctattgtttgttctaatataaacgagtatagcatcattgctaaatttttcaatagtatcaaaaacagaatatcctaaaccatataatatatattcaggaacactcaaactaaatgtccaggattctcctaaatacgtaaactttaatagtgcgaaatcattcaaaaatctaccacttatagatagatagtacataaatgcgtatagtagtctacctatctctttattatgaaaaccggcattacgatcatatatgtcgtgatatacctgtgatccgtttacgttaaaccataaatacatgggtgatcctataaacatgaatttatttctaattctcagagctatagttaattgaccgtgtaatatttgcttacatgcatacttgatacgcttattaataagatttttatcattgctcgttatttcagaatcgtatatataaggagtaccatcgtgattcttaccagatattatacaaaatactatatataaaatatattgacccacgttagtaatcatataaatgtttaacgttttaaattttgtattcaatgatccattatcatacgctatcatggtcttgtaatattcattctttaaaatataatattgtgttagccattgcattggagctcctaatggagattttctattctcatccattttaggataggctttcataaagtccctaataacttcgtgaataatgtttctatgttttctactgatgcatgtatttgcttcgatttttttatcccatgtttcatctatcatagatttaaacgcagtaatgctcgcaacattaacatcttgaaccgttggtacaattccgttccataaatttataatgttcgccatttatataactcattttttgaatatacttttaattaacaaaagagttaagttactcatatggacgccgtccagtctgaacatcaatctttttagccagagatatcatagccgctcttagagtttcagcgtgattttccaacctaaatagaacttcatcgttgcgtttacaacacttttctatttgttcaaactttgttgttacattagtaatctttttttccaaattagttagccgttgtttgagagtttcctcattgtcgtcttcatcggctttaacaattgcttcgcgtttagcctctggctttttagcagcctttgtagaaaaaaattcagttgctggaattgcaagatcgtcatctccggggaaaagagttccgtccatttaaagtacagattttagaaactgacactctgcgttatttatatttggtacaacacatggattataaatattgatgttaataacatcagaaaatgtaaagtctatacattgttgcatcgtgttaaattttctaatggatctagtattattgggtccaacttctgcctgaaatccaaatatggaagcggatacaaaaccgtttcctggataaaccacacatctccacttttgctttacatcagaaattgtgtcgttgacatcttgaactctcctatctaatgccggtgttccacctatagattttgaatattcgaatgctgcatgagtagcattaaattccttaatattgccataattttcatatattgagtaaccctggataaaaagtaaacacaccgcagccgtcgctaccacaataaaaaaaattgatagagagttcatttataatctattagaagctgacaaaatttttttacacgcatcagacaatgctttaataaatagttcaacatctacttttgtcatatcgaaccgatggtatgattctaacctagaattacatccgaaaaagttgactatgttcatagtcattaagtcattaacaaacaacattccagactctggattataagacgatactgtttcgtcacaattacctaccttaatcatgtgattatgaatattggctattagagcaccttctaagaaatctataatatctttgaaacacgatttaaaatcaaaccacgaatatacttctacgaagaaagttagtttacccataggagaaataactataaatggagatctaaatacaaaatccggatctatgatagttttaacattattatattctctattaaatacctccacatctaaaaatgttaattttgaaactatgtcttcgtttattaccgtacctgaactaaacgctataagctctattgtttgagaactctttaaacgatattcttgaaatacatgtaacaaagtttcctttaactcggtcggtttatctaccatagttacagaatttgtatccttatctataatataataatcaaaatcgtataaagttatataattatcgcgttcagattgggatcttttcaaatagactaaaaaccccatttctctagtaagtatcttatgtatatgtttgtaaaatatcttcatggtgggaatatgctctaccgcagttagccattcctcattgacagcggtagatgtattagacaaaactattccaatgtttaacaagggccattttacgagattattaaatccttgtttgataaatgtagccaatgagggttcgagttcaacgacgattgaattctcttcccgcggatgctgcatgatgaacgacgggatgttgttcgattgatttggaattctttttcgactttttgtttatattaaatattttaaaatttatagcggatagcaattcatgtaccacggataatgtagacgcgtattgcgcatcgatatctttattattagataaatttatcaataaatgtgagaagtttgcctcgttaaggtcttccatttaaatattatataaacatttgtgtttgtaacttattcgtcttttatggaatagttttttactagtaaagctgcaattacacactttgtccgtaaaacataaatataaacaccagcttttatcaatcgttccaaaaagtcgacggcggacatttttaacatggcatctattttaaatacacttaggtttttggaaaaaacatcattttataattgtaacgattcaataactaaagaaaagattaagattaaacataagggaatgtcatttgtattttataagccaaagcattctaccgttgttaaatacttgtctggaggaggtatatatcatgatgatttggttgtattggggaaggtaacaattaataatctaaagatgatgctattttacatggatttatcatatcatggagtgacaagtagtggagcaatttacaaattgggatcgtctatcgatagactttctctaaataggactattgttacaaaagttaataattatgatgatacattttttgacgacgatgattgatcgctattgcacaattttgtttttgtactttctaatatagtgtttaggttctttttcatatgagaatattgatttactaaaatatctatgtttaacttttgttctatgacgtccttatcggcggtatcggtacatatacgtaattcaccttcacaaaatacggagtcttcgataataatagccaatcgattattggatctagctgtctgtatcatattcaacatgtttaatatatcctttcgtttcccctttacaggcatcgatcgtagcatattttccgcgtctgatatggaaatgttaaaactacaaaaatgcgtaatgttagcccgtcctaatattggtacgtgtctataagtttggcatagtagaataatagacgtgtttaaatgccttccaaagtttaagaattctattagagtattgcattttgatagtttatcgcctacatcatcaaaaataagtaaaaagtgtgctgattttttatgattttgtgcgacagcaatacatttttctatgttacttttagttcgtatcagattatattctagagattcctgactactaacgaaattaatatgatttggccaaatgtatccatcataatctgggttataaacgggtgtaaacaagaatatatgtttatattttttaactagtgtagaaaacagagatagtaaatagatagtttttccagatccagatcctcctgttaaaaccattctaaacggcatttttaataaattttctcttgaaaattgtttttcttggaaacaattcataattatatttacagttactaaattaatttgataataaatcaaaatatggaaaactaaggttgttagtagggaggagaacaaagaaggcacatcgtgatataaataacatttattatcatgatgacaccagaaaacgacgaagagcagacatctgtgttctccgctactgtttacggagacaaaattcagggaaagaataaacgcaaacgcgtgattggtctatgtattagaatatctatggttatttcactactatctatgattaccatgtccgcgtttctcatagtgcgcctaaatcaatgcatgtctgctaacgaggctgctattactgacgccgctgttgccgttgctgctgcatcatctactcatagaaaggttgcgtctagcactacacaatatgatcacaaagaaagctgtaatggtttatattaccagggttcttgttatatattacattcagactaccagttattctcggatgctaaagcaaattgcactgcggaatcatcaacactacccaataaatccgatgtcttgactacctggctcattgattatgttgaggatacatggggatctgatggtaatccaattacaaaaactacatccgattatcaagattctgatgtatcacaagaagttagaaagtatttttgtgttaaaacaatgaactaatatttatttttgtacattaataaatgaaatcgcttaatagacaaactgtaagtaggtttaagaagttgtcggtgccggccgctataatgatgatactctcaaccattattagtggcataggaacatttctgcattacaaagaagaactgatgcctagtgcttgcgccaatggatggatacaatacgataaacattgttatttagatactaacattaaaatgtctacagataatgcggtttatcagtgtcgtaaattacgagccagattgcctagacctgatactagacatctgagagtattgtttagtattttttataaagattattgggtaagtttaaaaaagaccaataataaatggttagatattaataatgataaagatatagatattagtaaattaacaaattttaaacaactaaacagtacgacggatgctgaagcgtgttatatatacaagtctggaaaactggttaaaacagtatgtaaaagtactcaatctgtactatgtgttaaaaaattctacaagtgacaacaaaaaatgaattaataataagtcgttaacgtacgccgccatggacgccgcgtttgttattactccaatgggtgtgttgactataacagatacattgtatgatgatctcgatatctcaatcatggactttataggaccatacattataggtaacataaaaactgtccaaatagatgtacgggatataaaatattccgacatgcaaaaatgctactttagctataagggtaaaatagttcctcaggattctaatgatttggctagattcaacatttatagcatttgtgccgcatacagatcaaaaaataccatcatcatagcatgcgactatgatatcatgttagatatagaagataaacatcagccattttatctattcccatctattgatgtttttaacgctacaatcatagaagcgtataacctgtatacagctggagattatcatctaatcatcaatccttcagataatctgaaaatgaaattgtcgtttaattcttcattctgcatatcagacggcaatggatggatcataattgatgggaaatgcaatagtaattttttatcataaaagttgtaaagtaaataataaaacaataaatattgaactagtagtacgtatattgagcaatcagaaatgatgctggtacctcttatcacggtgaccgtagttgcgggaacaatattagtatgttatatattatatatttgtaggaaaaagatacgtactgtctataatgacaataaaattatcatgacaaaattaaaaaagataaagagttctaattccagcaaatctagtaaatcaactgatagcgaatcagactgggaggatcactgtagtgctatggaacaaaacaatgacgtagataatatttctaggaatgagatattggacgatgatagcttcgctggtagtttaatatgggataacgaatccaatgttatggcgcctagcacagaacacatttacgatagtgttgctggaagcacgctgctaataaataatgatcgtaatgaacagactatttatcagaacactacagtagtaattaatgaaacggagactgttaaagtacttaatgaagataccaaacagaatcctaactattcatccaatcctttcgtaaattataataaaaccagtatttgtagcaagtcaaatccgtttattacagaacttaacaataaatttagtgagaataatccgtttagacgagcacatagcgatgattatcttaataagcaagaacaagatcatgaacacgatgatatagaatcatcggtcgtatcattggtgtgattagtttcctttttataaaattgaagtaatatttagtattattgctgccgtcacgttgtacaaatggagatattccctgtattcggcatttctaaaattagcaattttattgctaataatgactgtagatattatatagatacagaacatcaaaaaattatatctgatgagatcaatagacagatggatgaaacggtacttcttaccaacatcttaagcgtagaagttgtaaatgacaatgagatgtaccatcttattcctcatagattatcgacgattatactctgtattagttctgtcggaggatgtgttatctctatagataatgacatcaatggcaaaaatattctaacctttcccattgatcatgctgtaatcatatccccactgagtaaatgtgtcgtagttagcaagggtcctacaaccatattggttgttaaagcggatatacctagcaaacgattggtaacatcgtttacaaacgacatactatatgtaaacaatctgtcactgattaattatttgccgttgtctgtattcattattagacgagtcaccgactatttggatagacacatatgcgatcagatatttgctaataataagtggtattcccttataaccatcgacgataagcaatatcctattccatcaaactgtataggtatgtcctctgccaagtacataaattctagcatcgagcaagatactttaatccatgtttgtaacctcgagcatccgttcgactcagtatacaaaaaaatgcagtcgtacaattctctacctatcaaggaacaaatattgtacggtagaattgataatataaatatgagcattagtatttctgtggattaatagatttctagtatggggatcattaatcatctctaatctctaaatacctcataaaacgaaaaaaaagctattatcaaatactgtacggaatggattcattctcttctctttttatgaaactctgttgtatatctactgataaaactggaagcaaaaaatctgatagaaagaataagaataagatcaaggattatatggaacacgattattataaaataacaatagttcctggttcctcttccacgtctactagctcgtggtattatacacatgcctagtaatagtctctttgcgttgacggaaagcagactagaaataacaggctaaaatgttcagacaccataatagttcccaacccagataataacagagttccatcaacacattcctttaaactcaatcccaaacccaaaaccgttaaaatgtatccggccaattgatagtagataatgaggtgtacagcgcatgataatttacacagtaaccaaaatgaaaacactttagtaattataagaaatatagacggtaatgtcatcatcaacaatccaataatatgcctgagagtaaacattgatggataaaacaaaaatgctccgcataactctatcatggcaataacacaaccaaatacttgtaagattcctaaattagtagaaaatacaacggatatcgatgtataagtgatctcgagaaataataagaataaagtaatgcccgtaaagataaacatcaacattgtttggtaatcattaaaccaattagtatgaagttgaactaatttcacagtagattttattccagtattatccccgcatgtatacgtacctggtaagatatctttatattccataatcaatgagacatcactatccgataacgaatgaagtctagcactagtatgccatttacttaatatggtcgtcttggaagttttattataagttaaaatatcatggttatccaatttccatctaatatactttgtcggattatctatagtacacggaataatgatggtatcattacatgctgtatactctatggtctttgtagttgttataacaaccaacgtatagaggtatatcaacgatattctaactcttgacattttttatttatttaaaatgatacctttgttatttattttattctattttgctaacggtattgaatggcataagtttgaaacgagtgaagaaataatttctacttacttattagacgacgtattatacacgggtgttaatggggcggtatacacattttcaaataataaactaaacaaaactggtttaactaataataattatatcacaacatctataaaagtagaggatgcggataaggatacattagtatgcggaaccaataacggaaatcccaaatgttggaaaatagacggttcagacgacccaaaacatagaggtagaggatacgctccttatcaaaatagcaaagtaacgataatcagtcacaacggatgtgtactatctgacataaacatatcaaaagaaggaattaaacgatggagaagatttgacggaccatgtggttatgatttatacacggcggataacgtaattccaaaagatggtttacgaggagcattcgtcgataaagatggtacttatgacaaagtttacattcttttcactgatactatcggctcaaagagaattgtcaaaattccgtatatagcacaaatgtgcctaaacgacgaaggtggtccatcatcattgtctagtcatagatggtcgacgtttctcaaagtcgaattagaatgtgatatcgacggaagaagttatagacaaattattcattctagaactataaaaacagataatgatacgatactatatgtattcttcgatagtccttattccaagtccgcattatgtacctattctatgaataccattaaacaatctttttctacgtcaaaattggaaggatatacaaagcaattgccgtctccagctcctggtatatgtttaccagctggaaaagttgttccacataccacgtttgaagtcatagaaaaatataatgtactagatgatattataaagcctttatctaaccaacctatcttcgaaggaccgtctggtgttaaatggttcgatataaaggagaaggaaaatgaacatcgggaatatagaatatacttcataaaagaaaattctatatattcgttcgatacaaaatctaaacaaactcgtagctcgcaagtcgatgcgcgactattttcagtaatggtaacttcgaaaccgttatttatagcagatatagggataggagtaggaatgccacaaatgaaaaaaatacttaaaatgtaatcttaatcgagtacaccacacgacaatgaacaaacataagacagattatgctggttatgcttgctgcgtaatatgcggtctaattgttggaattatttttacagcgacactattaaaagttgtagaacgtaaattagttcatacaccatcaatagataaaacgataaaagatgcatatattagagaagattgtcctactgactggataagctataataataaatgtatccatttatctactgatcgaaaaacctgggaggaaggacgtaatgcatgcaaagctctaaatccaaattcggatctaattaagatagagactccaaacgagttaagttttttaagaagcattagacgcggatattgggtaggagaatccgaaatattaaaccagacaaccccatataattttatagctaagaatgccacgaagaatggaactaaaaaacggaaatatatttgtagcacaacgaatactcccaaactgcattcgtgttacactatataacaattacactacatttttatcataacactacttcggttagatgttttagaaaaaaataaatatcgccgtaccgttcttgtttttataaaaataacaattaacaattatcaaattttttctttaatattttacgtggttgaccattcttggtggtaaaataatctcttagtgttggaatggaatgctgtttaatgtttccacactcatcgtatattttgacgtatgcagtcacatcgtttacgcaatagtcagactgtagttctatcatgcttcctacattagaaggaggaacagttttaaagtctcttggttttaatctattaccgttagttttcatgaaatcctttgttttatccacttcacattttaaataaatgtccactatacattcttttgttaattttactagatcgtcatgggtcatagaatttataggttccgtagtccatggatccaaactagcaaacttcgcgtatacggtatcgcgattagtgtatacaccaactgtatgaaaattaagaaaacagtttaatagatcaacagaaatatttaatcctccgtttgatacagatgcgccatatttatggatttcggattcacacgttgtttgtctgaggtgttcgtctagtgttgcttctacgtaaactttgattcccatatattctttattgtcagaatcgcataccgatttatcatcatacactgtttgaaaactaaatggtatacacatcaaaataacaaatactaacgagtacattctgcaatattgttatcgtaattggaaaaatagtgttcgagtgagttggattatgtgagtattggattgtatattttattttatattttgtaataagaataaaatgctaatgtcaagtttattccaatagatgtcttattaaaaacatatataataaataacaatggctgaatggcataaaattatcgaggatatctcaaaaaataataagttcgaggatgccgccatcgttgattacaagactacaaagaatgttctagctgctattcctaacagaacatttgccaagattaatccgggtgaaattattcctctcatcactaatcgtaatattctaaaacctcttattggtcagaaatattgtattgtatatactaactctctaatggatgagaacacgtatgctatggagttgcttactgggtacgcccctgtatctccgatcgttatagcgagaactcataccgcacttatatttttgatgggtaagccaacaacatccagacgtgacgtgtatagaacgtgtagagatcacgctacccgtgtacgtgcaactggtaattaaaataaaaagtaatattcatatgtagtgtcaattttaaatgatgatgatgaaatggataatatccatattgacgatgtcaataatgccggtattggcatacagttcatcgatttttagatttcattcagaggatgtggaattatgttatgggcatttgtattttgataggatctataatgtagtaaatataaaatataatccgcatattccatatagatataattttattaatcgcacgttaaccgtagatgaactagacgataatgtcttttttacacatggttattttttaaaacacaaatatggttcacttaatcctagtttgattgtctcattatcaggaaacttaaaatataatgatatacaatgctcagtaaatgtatcgtgtctcattaaaaatttggcaacgagtacatctactatattaacatctaaacataagacttattctctacatcggtccacgtgtattactataataggatacgattctattatatggtataaagatataaatgacaagtataatgacatctatgattttactgcaatatgtatgctaatagcgtctacattgatagtgaccatatacgtgtttaaaaaaataaaaatgaactcttaattatgctatgctattagaaatggataaaatcaaaattacggttgattcaaaaattggtaatgttgttaccatatcgtataacttggaaaagataactattgatgtcacacctaaaaagaaaaaagaaaaggatgtattattagcgcaatcagttgctgtcgaagaggcaaaagatgtcaaggtagaagaaaaaaatattatcgatattgaagatgacgatgatatggatgtagaaagcgcgtaatacgatctataaaaataagtatataaatactttttatttactgtactcttactgtgtagtggtgataccctactcgattatttttttaaaaaaaaaatacttattctgattcttctagccatttccgtgttcgtttgaatgccacatcgacgtcaaagataggggagtagttgaaatctagttctgcattgttggtacgcacctcaaatgtagtgttggatatcttcaacgtatagttgttgagtagtgatggttttctaaatagaattctcttcatatcattcttgcacgcgtacatttttagcatccatcttggaatcctagatccttgttctattcccaatggtttcatcaatagaagattaaacatatcgtacgaacacgatggagagtaatcgtagcaaaagtaagcatttcctttaatcttagatcccggatactggatatattttgcagccaacacgtgcatccatgcagcatttcctacatatacccggctatgcaccgcgtcatcatcgactgtacgatacataatgttaccgtgttgcttacattgctcgtaaaagactttcatcaatttgtctccttctccgtaaattccagtgggtcttaggcaacaagtatacaattttgctccattcatgattacggaattattggctttcataaccagttgctcggccatacgtttactttttgcgtatacatgtcctggtgatatatcataaagggtatgctcatggccgatgaatggatcaccgtgtttattgggtcctattgcttccatgctactagtatagatcaaatacttgattcctaggtccacacaagctgccaaaatagtctgtgttccataatagtttactttcatgatttcattatcggtgtattttccaaatacatccactagagcagccgtatgaataatcagatttaccccatctagcgcttctctcaccttatcaaagtcgtttatatcacattgtatatagtttataaccttaactttcgaggttattggttgtggatcttctacaatatctatgactctgatttcttgaacatcatctgcactaattaacagttttactatatacctgcctagaaatccggcaccaccagtaaccgcgtacacggccattgctgccactcataatatcagactacttattctattttactaaataatggctgtttgtataatagaccacgataatatcagaggagttatttactttgaaccagtccatggaaaagataaagttttaggatcagttattggattaaaatccggaacgtatagtttgataattcatcgttacggagatattagtcaaggatgtgattccataggcagtccagaaatatttatcggtaacatctttgtaaacagatatggtgtagcatatgtttatttagatacagatgtaaatatatctacaattattggaaaggcgttatctatttcaaaaaatgatcagagattagcgtgtggagttattggtatttcttacataaatgaaaagataatacattttcttacaattaacgagaatggcgtttgatatatcagttaatgcgtctaaaacaataaatgcattagtttacttttctactcagcaaaataaattagtcatacgtaatgaagttaatgatacacactacactgtcgaatttgatagggacaaagtagttgacacgtttatttcatataataaacataatgacaccatagagataagaggggtgcttccagaggaaactaatattggttgcgcggttagtatgacttacttgtataataagtatagttttaaactgattttagcagaatatataagacacagaaatactatatccggcaatatttattcggcattgatgacactagatgatttggctattaaacagtatggagacattgatctattatttaatgagaaacttaaagtagactccgattcgggactatttgactttgtcaactttgtaaaggatatgatatgttgtgattctagaatagtagtagctctatctagtctagtatctaaacattgggaattgacaaataaaaagtataggtgtatggcattagccgaacatatatctgatagtattccaatatctgagctatctagactacgatacaatctatgtaagtatctacgcgggcacactgagagcatagaggatgaatttgattattttgaagacgatgattcgtctacatgttctgccgtaaccgacagggaaacggatgtataattttttttatagcgtgaaggatatgataaaaaatataattgttgtatttatcccattccaatcaccttatatgattctgtaacacaataaaggagtctcatagatgtatagaggtcagatactggtttgataaactgtttattccacataagtatgtttgactttatggttagacccgcatactttaacaaatcactgaaaattggagttaggtattgacctctcagaatcagttgccgttctggaacattaaatgtattttttatgatatactccaacgcatttatgtgggcatacaacaagtcattactaatggagtattccaagagttttagttgtctagtatttaacaagagaagagatttcaacagactgtttatgaactcgaatgccgcctcattgtcgcttatattgatgatgtcgaattctcccaatatcatcactgatgagtagctcatcttgttatcgggatccaagttttctaaagatgtcattaaaccctcgatcatgaatggatttatcatcatcgtttttatgttggacatgagcttagtccgtttgtccacatctatagacgacgatttctgaattatttcatatatccctctctttaactccaggaacttgtcaggatggtctactttaatatgttctcgtctaagagatgaaaatctttggatggttgcacgcgacttttctctaaaggatgacgttgcccaagatcctctcttaaatgaatccatcttatccttggacaagatggacagtctattttccttagatggtttaatatttttgttacccatgatctataaaggtagacctaatcgtctcggatgacctatatatttattttcagttttattatacgcataaattgtaaaaaatatgttaggtttacgaaaatgtctcgtggggcattaatcgtttttgaaggattggacaaatctggaaaaacaacacaatgtatgaacatcatggaatctataccggcaaacacgataaaatatcttaactttcctcagagatccactgtcactggaaagatgatagatgactatctaactcgtaaaaaaacctataatgatcatatagttaatctattattttgtgcaaatagatgggagtttgcatcttttatacaagaacaactagaacagggaattactttaatagttgatagatacgcattttctggagtagcgtatgccgccgctaaaggcgcgtcaatgactctcagtaagagttatgaatctggattgcctaaacccgacttagttatattcttggaatctggtagcaaagaaattaatagaaacgtcggcgaggaaatttatgaagatgttacattccaacaaaaggtattacaagaatataaaaaaatgattgaagaaggagatattcattggcaaattatttcttctgaattcgaggaagatgtaaagaaggagttgattaagaatatagttatagaggctatacacacggttactggaccagtggggcaactgtggatgtaatagtgaaattacattttttataaatagatgttagtacagtgttataaatggatgaagcatattactctggcaacttggaatcagtactcggatacgtgtccgatatgcataccgaactcgcatcaatatctcaattagttattgccaagatagaaactatagataatgatatattaaacaaggacattgtaaattttatcatgtgtagatcaaacttggataatccatttatctctttcctagatactgtatatactattatagatcaagagaactatcagaccgaattgattaattcattagacgacaatgaaattatcgattgtatagttaataagtttatgagcttttataaggataacctagaaaatatagtagatgctatcattactctaaaatatataatgaataatccagattttaaaactacgtatgccgaagtactcggttccagaatagccgatatagatattaaacaagtgatacgtaagaatatactacaattgtctaatgatatccgcgaacgatatttgtgaaaaatattaaaaaaaaatactttttttattaaatgacgtcgcttcgcgaatttagaaaattatgctgtgatatatatcacgcatcaggatataaagaaaaatctaaattaattagagactttataacagatagggatgataaatatttgatcattaagctattgcttcccggattagacgatagaatttataacatgaacgataaacaaattataaaattatatagtataatatttaaacaatctcaggaagatatgctacaagatttaggatacggatatataggagacactattaggactttcttcaaagagaacacagaaatccgtccacgagataaaagcattttaactttagaagaagtggatagttttttaactacgttatcatccgtaactaaagaatcgcatcaaataaaattattgactgatatcgcatccgtttgtacatgtaatgatttaaaatgtgtagtcatgcttattgataaagatctaaaaattaaagcgggtcctcggtacgtacttaacgctattagtcctcatgcctatgatgtgtttagaaaatctaataacttgaaagagataatagaaaatgcatctaaacaaaatctagactctatatctatttctgttatgactccaattaatcccatgttagcggaatcgtgtgattctgtcaataaggcgtttaaaaaatttccatcaggaatgtttgcggaagtcaaatacgatggtgaaagagtacaagttcataaaaataataacgagtttgccttctttagtagaaacatgaaaccagtactctctcataaagtggattatctcaaagaatacataccgaaagcatttaaaaaagctacgtctatcgtattggattctgaaattgttcttgtagacgaacataatgtaccgctaccgtttggaagtttaggaatacacaaaaagaaagaatataaaaactctaacatgtgtttgttcgtgtttgactgtttgtactttgatggattcgatatgacggacattccattgtacgaacgaagatcttttctcaaagatgttatggttgaaatacccaatagaatagtattctcagagttgacgaatattagtaacgagtctcagttaactgacgtattggatgatgcactaacgagaaaattagaaggattggtcttaaaagatattaatggagtatacgaaccgggaaagagaagatggttaaaaataaagcgagactatttgaacgagggttccatggcagattctgccgatttagtagtactaggtgcctactatggtaaaggagcaaagggtggtatcatggcagtctttctaatgggttgttacgacgatgaatccggtaaatggaagacggttaccaagtgttcaggacacgatgataatacgttaagggagttgcaagaccaattaaagatgattaaaattaacaaggatcccaaaaaaattccagagtggttagtagttaataaaatctatattcccgattttgtagtagaggatccgaaacaatctcagatatgggaaatttcaggagcagagtttacatcttccaagtcccataccgcaaatggaatatccattagatttcctagatttactaggataagagaggataaaacgtggaaagaatctactcatctaaacgatttagtaaacttgactaaatcttaatagttacatacaaactgaaaattaaaataacactatttagttggtggtcgccatggatggtgttattgtatactgtctaaacgcgctagtaaaacatggcgaggaaataaatcatataaaaaatgatttcatgattaaaccatgttgtgaaagagtttgtgaaaaagtcaagaacgttcacatcgacggacaatctaaaaacaatacagtgattgcagatttgccatatctggataatgcggtatccgatgtatgcaattcactgtataaaaagaatgtatcaagaatatccagatttgctaatttgataaagatagatgacgatgacaagactcctactggtgtatataattattttaaacctaaagatgccattcctgttatcatatctataggaaaggataaagatgtctgtgaactattaatctcatctgataaagcgtgtgcgtgtatagagttaaattcatataaagtagccattcttcccatggatgtttccttttttaccaaaggaaatgcatcattgattattctcctgtttgatttctctatcgatgcggcacctctcttaagaagtgtaaccgataataatgttattatatctagacaccagcgtctacatgacgagcttccgagttccaattggttcaagttttacataagtataaagtccgactattgttctatattatatatggttgttgatggatctgtgatgcatgcgatagctgataatagaactcacgcaattattagcaaaaatatattagacaatactacgattaacgatgagtgtagatgctgttattttgaaccacagattaggattcttgatagagatgagatgctcaatggatcatcgtgtgatatgaacagacattgtattatgatgaatttacctgatgtaggcgaatttggatctagtatgttggggaaatatgaacctgacatgattaagattgctctttcggtggctggtaatttaataagaaatcgagactacattcccgggagacgaggatatagctactacgtttacggtatagcctctagataatttttttaagcacgaaataaaaaacataattttaaaccaatctatttcatactattttgtgtgatcaccatggacataaagatagatattagtatttctggtgataaatttacggtgactactaggagggaaaatgaagaaagaaaaaaatatctacctctccaaaaagaaaaaactactgatgttatcaaacctgattatcttgagtacgatgacttgttagatagagatgagatgtttactattctagaggaatattttatgtacagaggtctattaggcctcagaataaaatatggacgactctttaacgaaattaaaaaattcgacaatgatgcggaagaacaattcggtactatagaagaactcaagcagaaacttagattaaattctgaagagggagcagataactttatagattatataaaggtacaaaaacaggatatcgtcaaacttactgtatacgattgcatatctatgataggattgtgtgcatgcgtggtagatgtttggagaaatgagaaactgttttctagatggaaatattgtttacgagcgattaaactgtttattgatgatcacatgcttgataagataaaatctatactgcagaatagactagtatatgtggaaatgtcatagaaagttaaaagttaatgagagcaaaaatatataaggttgtattccatatttgttattttttctgtaatagttaaaaaaatacattcgatggtctatctatcagattattatgtgttataaggtactttttctcataataaactagagtatgagtaagatagtgtttttcaaaacatataaatctaaaattgatggatgagatatacagctattaatttcgaaaatatattttaatctgataactttaaacatggatttttgatggtggtttaacgttttaaaaaaagattttgttattgtagtatatgataatattaaaagatggatataaagaatttgctgactgcatgtactattttttacattactacattggctacggcagatatacctacttcgtcactgccacacgctccggtaaacggggcatgtgacgagggagaatatcttgataagaggcataatcaatgttgtaatcagtgtccacctggagaatttgccaaggtcagatgtaatggtaacgataacacaaaatgtgaacgctgcccacctcatacatataccgcaatccccaattactctaatggatgtcatcaatgtagaaaatgcccaacaggatcatttgataaggtaaagtgtaccggaacacagaacagtaaatgttcgtgtcttcctggttggtattgcgctactgattcttcacagactgaagattgtcgagattgtataccaaaaaggagatgtccatgcggatactttggtggaatagatgaacaaggaaatcctatttgtaaatcgtgttgtgttggtgaatattgcgactacctacgtaattatagacttgatccatttcctccatgcaaactatctaaatgtaattaattatgattttgatgataatgttaccatacattatatcgctacttggttagtgtattattcagtatgaagacctattaataattacttatcttttgacgatcttgttataattataatataaaaacttatggcatagtaacttataattgctgacgcgataaattcgtaataatctgttttgttcaaaggaatctacaggcataaaaataaaaatataatttataatatactcttacagcgcgccatcatgaataacagcagtaaattaattgctgttattaatggatttagaaatagtggacgattttgtgatattaatatagttattaatgatgaaaggataaacgctcacagactcatcctatctggagcctccgaatatttttccattctgttttccaataattttatcgattctaatgaatacgaagttaatctaagtcatttagattatcaaagcgtaaacgatttgatcgattacatttatgggatacctttgagcctaactaacgataacgtgaaatatattctttcaaccgctgattttttacaaattggatctgctattacggagtgtgaaaattacatacttaaaaatctttgttctagaaactgtatcgatttctacatatacgctgataaatataataacaagaaaatagaatcagcgtcgtttaacacaatattacaaaatattttgagactcatcaacgatgaaaactttaaatacttaacagaggaatcaatgataaaaattttaagcgatgatatgttaaatataaaaaatgaggatttcgccccactaattctcattaaatggttagagagtactcaacaatcatgcaccgtcgagttacttagatgcctcagaatatcattgctttccccacaagttataaaatcactttatagtcatcaactggttagttcaatctacgaatgtataacattcttaaacaatatagcattcttggatgaatcatttcctagataccatagcatcgagttgatatctatcggtataagtaattcgcatgataagatttccataaactgctacaatcataaaaaaaatacatgggaaatgatatcttcacgtagatataggtgtagtttcgcagtggccgtcctggataatattatctatatgatgggtggatatgatcagtccccgtatagaagttcaaaggttatagcgtacaatacatgtacaaattcttggatatatgatataccagagctaaaatatcctcgttctaattgtgggggactggctgatgacgaatacatttattgtataggcggcatacgcgatcaggattcatcgttgacatctagtattgatagatggaagccatcaaaaccatattggcagaagtatgctaaaatgcgcgaaccaaaatgtgatatgggggttgcgatgttaaacggattaatatatgttataggtggaatcgttaaaggtgacacgtgtaccgacgcactagagagtttatcagaagatggatggatgaagcatcaacgtcttccaataaaaatgtccaatatgtcgacgattgttcatgatggcaagatttatatatctggaggttacaacaatagtagtgtagttaatgtaatatcgaatctagtccttagctataattcgatatatgatgaatggaccaaattatcatcattaaacattcctagaattaatcccgctctatggtcagcgcataataaattatatgtaggaggaggaatatctgatgatgttcgaactaatacatctgagacatacgacaaagaaaaagattgttggacattggataatggtcacgtgttaccacgcaattatataatgtataaatgcgaaccgattaaacataaatatccattggaaaaaacacagtacacgaatgattttctaaagtatttggaaagttttataggtagttgatagaacaaaatacataattttgtaaaaataaatcactttttatactaatatgacacgattaccaatacttttgttactaatatcattagtatactctacaccttctcctcagacatctaaaaaaataggtgatgatgcaactctatcatgtaatcgaaataatacaaatgactacgttgttatgagtgcttggtataaggagcccaattccattattcttttagctgctaaaagcgacgtcttgtattttgataattataccaaggataaaatatcttacgactctccatacgatgatctagttacaactatcacaattaaatcattgactgctagagatgccggtacttatgtatgtgcattctttatgacatcgcctacaaatgacactgataaagtagattatgaagaatactccacagagttgattgtaaatacagatagtgaatcgactatagacataatactatctggatctacacattcaccggaaactagttctgagaaacctgattatatagataattctaattgctcgtcggtattcgaaatcgcgactccggaaccaattactgataatgtagaagatcatacagacaccgtcacatacactagtgatagcattaatacagtaagtgcatcatctggagaatccacaacagacgagactccggaaccaattactgataaagaagatcatacagtcacagacactgtctcatacactacagtaagtacatcatctggaattgtcactactaaatcaaccaccgatgatacgtacaatgataatgatacagtaccaccaactactgtaggcggtagtacaacctctattagcaattataaaaccaaggactttgtagaaatatttggtattaccgcattaattatattgtcggccgtggcaatattctgtattacgtattatatatgtaataaacgttcacgtaaatacaaaacagagaacaaagtctagatttttgacttacataaatgtctgggatagtaaaatctatcatattgagcgggccatctggtttaggaaagacagccatagccaaaagactatgggaatatatttggatttgtggtgtcccataccactagatttcctcgtcctatggaacgagaaggtgtcgattaccattacgttaacagagaggccatctggaagggaatagccgccggaaactttctagaacatactgagtttttaggaaatatttacggaacttctaaaactgctgtgaatacagcggctattaataatcgtatttgtgtgatggatctaaacatcgatggcgttagaagtcttaaaaatacgtacctaatgccttactcggtgtatataagacctacctctcttaaaatggttgagaccaagcttcgttgtagaaacactgaagcggatgatgagattcatcgtcgtgtgatgttggcaaaaactgacatggatgaggcaggtgaagccggtctattcgacactattatcattgaagatgatgtgaatttagcatatagtaagttaattcagatactacaggaccgtattagaatgtattttaacactaattagagacttaagacttaaaacttgataattaataatataactcgtttttatatgtggctatttcaacgtctaatgtattagttaaatattaaaacttaccacgtaaaacttaaaatttaaaatgatatttcattgacagatagatcacacattatgaactttcaaggacttgtgttaactgacaattgcaaaaatcaatgggtcgttggaccattaataggaaaaggtggatttggtagtatttatactactaatgacaataattatgtagtaaaaatagagcccaaagctaacggatcattatttaccgaacaggcattttatactagagtacttaaaccatccgttatcgaagaatggaaaaaatctcacaatataaagcacgtaggtcttatcacgtgcaaggcatttggtctatacaaatccattaatgtggaatatcgattcttggtaattaatagattaggtgcagatctagatgcggtgatcagagccaataataatagactaccaaaaaggtcggtgatgttgatcggaatcgaaatcttaaataccatacaatttatgcacgagcaaggatattctcacggagatattaaagcgagtaatatagtcttggatcaaatagataagaataaattatatctagtggattacggattggtttctaaattcatgtctaacggcgaacatgttccatttataagaaatccaaataaaatggataacggtactctagaatttacacctatagattcgcataaaggatacgttgtatctagacgtggagatctagaaacacttggatattgtatgattagatggttgggaggtatcttgccatggactaagatatctgaaacaaagaattgtgcattagtaagtgccacaaaacagaaatatgttaacaatactgcgactttgttaatgaccagtttgcaatatgaacctagagaattgctgcaatatattaccatggtaaactctttgacatattttgaggaacccaattacgacgagtttcggcacatattaatgcagggtgtatattattaagtgtggtgtttggtcgataaaaattaaaaaataacttaatttattattgatctcgtgtgtacaaccgaaatcatggcgatgttttacgcacacgctctcggtgggtacgacgagaatcttcatgcctttcctggaatatcatcgactgttgccaatgatgtcaggaaatattctgttgtgtcagtttataataacaagtatgacattgtaaaagacaaatatatgtggtgttacagtcaggtgaacaagagatatattggagcactgctgcctatgtttgagtgcaatgaatatctacaaattggaaatccgatccatgatcaagaaggaaatcaaatctctatcatcacatatcgccacaaaaactactatgctctaagcggaatcgggtacgagagtctagacttgtgtttggaaggagtagggattcatcatcacgtacttgaaacaggaaacgctgtatatggaaaagttcaacatgattattctactatcaaagagaaggccaaagaaatgagtgcacttagtccaggacctatcatcgattaccacgtctggataggagattgtatctgtcaagttactgctgtggacgtacatggaaaggaaattatgaaaatgagattcaaaaagggtgcggtgcttccgatcccaaatctggtaaaagttaaacttggggagaatgatacagaaaatctttcttctactatatcggcggcaccatcgaggtaaccacctctctggaagacagcgtgaataatgtactcatgaaacgtttggaaactatacgccatatgtggtctgttgtatatgatcattttgatattgtgaatggtaaagaatgctgttatgtgcatacgcatttgtctaatcaaaatcttataccgagtactgtaaaaacaaatttgtacatgaagactatgggatcatgcattcaaatggattccatggaagctctagagtatcttagcgaactgaaggaatcaggtggatggagtcccagaccagaaatgcaggaatttgaatatccagatggagtggaagacactgaatcaattgagagattggtagaggagttcttcaatagatcagaacttcaggctggtgaatcagtcaaatttggtaattctattaatgttaaacatacatctgtttcagctaagcaactaagaacacgtatacggcagcagcttccttctatactctcatcttttaccaacacaaagggtggatatttgttcattggagttgataataatacacacaaagtatttggattcacggtgggttacgactacctcagactgatagagaatgatatagaaaagcatatcaaaagactttgtgttgtgtatttctgtgagaagaaagaggacatcaagtacgcgtgtcgattcatcaaggtatataaacctggggatgaggctacctcgacatacgtgtgcgctatcaaagtggaaagatgctgttgtgctgtgtttgcagattggccagaatcatggtatatggatactaatggtatcaagaagtattctccagatgaatgggtgtcacatataaaattttaattaatgtaactatagagaacaaataataaggttgtaatatcatatagacaataactaacaattaattagtaactgttatctcttttttaattaaccaactaactatatacctattaatacatcgtaattatagttcttaacatctattaatcattaattcgcttctttaattttttataaactaacattgttaattgaaaagggataacatgttacagaatataaattatatatggatttttttaaaaaggaaatacttgactggagtatatatttatctcttcattatatagcacgcgtgttttccaatttttccacatcccatataatacaggattataatctcgttcgaacatacgagaaagtggataaaacaatagttgattttttatctaggttgccaaatttattccatattttagaatatggggaaaatattctacatatttattctatggatgatgctaatacgaatattataattttttttctagatagagtattaaatattaataagaacgggtcatttatacacaatctcgggttatcatcatccattaatataaaagaatatgtatatcaattagttaataatgatcatccagataataggataagactaatgcttgaaaatggacgtagaacaagacattttttgtcctatatatcagatacagttaatatctatatatgtattttaataaatcatggattttatatagatgccgaagacagttacggttgtacattattacatagatgtatatatcactataagaaatcagaatcagaatcatacaatgaattaattaagatattgttaaataatggatcagatgtagataaaaaagatacgtacggaaacacaccttttatcctattatgtaaacacgatatcaacaacgtggaattgtttgagatatgtttagagaatgctaatatagactctgtagactttaatagatatacacctcttcattatgtctcatgtcgtaataaatatgattttgtaaagttattaatttctaaaggagcaaatgttaatgcgcgtaataaattcggaactactccattttattgtggaattatacacggtatctcgcttataaaactatatttggaatcagacacagagttagaaatagataatgaacatatagttcgtcatttaataatttttgatgctgttgaatctttagattatctattatccagaggagttattgatattaactatcgtactatatacaacgaaacatctatttacgacgctgtcagttataatgcgtataatacgttggtctatctattaaacaaaaatggtgattttgagacgattactactagtggatgtacatgtatttcggaagcagtcgcaaacaacaacaaaataataatggaagtactattgtctaaacgaccatctttgaaaattatgatacagtctatgatagcaattactaaacataaacagcataatgcagatttattgaaaatgtgtataaaatatactgcgtgtatgaccgattatgatactcttatagatgtacagtcgctacagcaatataaatggtatattttaagatgtttcgatgaaatagatatcatgaagagatgttatataaaaaataaaactgtattccaattagttttttgtatcaaagacattaatactttaatgagatacggtaaacatccttctttcgtgaaatgcactagtctcgacgtatacggaagtcgtgtacgtaatatcatagcatctattagatatcgtcagagattaattagtctattatccaagaagctggatcctggagataaatggtcgtgttttcctaacgaaataaaatataaaatattggaaaactttaacgataacgaactatccacatatctaaaaatcttataaacattattaaaatataaaatctaagtaggataaaatcacactacatcattgtttccttttagtgctcgacagtgtatactatttttaacgctcataaataaaaatgaaaacgatttccgttgttacgttgttatgcgtactacctgctgttgtttattcaacatgtactgtacccactatgaataacgctaaattaacgtctaccgaaacatcgtttaatgataaccagaaagttacgtttacatgtgatcagggatatcattctttggatccaaatgctgtctgtgaaacagataaatggaaatacgaaaatccatgcaaaaaaatgtgcacagtttctgattatgtctctgaactatataataaaccgctatacgaagtgaattccaccatgacactaagttgcaacggcgaaacaaaatattttcgttgcgaagaaaaaaatggaaatacttcttggaatgatactgttacgtgtcctaatgcggaatgtcaacctcttcaattagaacacggatcgtgtcaaccagttaaagaaaaatactcatttggggaatatatgactatcaactgtgatgttggatatgaggttattggtgcttcgtacataagttgtacagctaattcttggaatgttattccatcatgtcaacaaaaatgtgatatgccgtctctatctaacggattaatttccggatctacattttctatcggtggcgttatacatcttagttgtaaaagtggttttacactaacggggtctccatcatccacatgtatcgacggtaaatggaatcccatactcccaatatgtgtacgaactaacgaaaaatttgatccagtggatgatggtcccgacgatgagacagatttgagcaaactctcgaaagacgttgtacaatatgaacaagaaatagaatcgttagaagcaacttatcatataatcatagtggcgttgacaattatgggcgtcatatttttaatctccgttatagtattagtttgttcctgtgacaaaaataatgaccaatataagttccataaattgctaccgtaaatataaatccgttaaaataattaataatttaataacaaacaagtatcaaaagattaaagacttatagctagaatcaattgagatgtcttcttcagtggatgttgatatctacgatgccgttagagcatttttactcaggcactattataacaagagatttattgtgtatggaagaagtaacgccatattacataatatatacaggctatttacaagatgcgccgttataccgttcgatgatatagtacgtactatgccaaatgaatcacgtgttaaacaatgggtgatggatacacttaatggtataatgatgaatgaacgcgatgtttctgtaagcgttggcaccggaatactattcatggaaatgtttttcgattacaataaaaatagtatcaacaatcaactaatgtatgatataattaatagcgtatctataattctagctaatgagagatatagaagcgcttttaacgacgatggtatatacatccgtagaaatatgattaacaagttgtacggatacgcatctctaactactattggcacgatcgctggaggtgtttgttattatctgttgatgcatctagttagtttgtataaataattatttcaatatactagttaaaattttaagattttaaatgtataaaaaactaataacgtttttatttgtaataggtgcattagcatcctattcgaataatgagtacactccgtttaataaactgagtgtaaaactctatatagatggagtagataatatagaaaattcatatactgatgataataatgaattggtgttaaattttaaagagtacacaatttctattattacagagtcatgcgacgtcggatttgattccatagatatagatgttataaacgactataaaattattgatatgtataccattgactcgtctactattcaacgcagaggtcacacgtgtagaatatctaccaaattatcatgccattatgataagtacccttatattcacaaatatgatggtgatgagcgacaatattctattactgcagagggaaaatgctataaaggaataaaatatgaaataagtatgatcaacgatgatactctattgagaaaacatactcttaaaattggatctacttatatatttgatcgtcatggacatagtaatacatattattcaaaatatgatttttaaaaatttaaaatatattatcacttcagtgacagtagtcaaataacaaacaacaccatgagatatattataattctcgcagttttgttcattaatagtatacatgctaaaataactagttataagtttgaatccgtcaattttgattccaaaattgaatggactggggatggtctatacaatatatcccttaaaaattatggcatcaagacgtggcaaacaatgtatacaaatgtaccagaaggaacatacgacatatccgcatttccaaagaatgatttcgtatctttctgggttaaatttgaacaaggcgattataaagtggaagagtattgtacgggactatgcgtcgaagtaaaaattggaccaccgactgtaacattgactgaatacgacgaccatatcaatttgtacatcgagcatccgtatgctactagaggtagcaaaaagattcctatttacaaacgcagtgacatgtgtgatatctacttgttgtatacggctaacttcacattcggagattctaaagaaccagtaccatatgatatcgatgactacgattgcacgtctacaggttgcagcatagactttgtcacaacagaaaaagtgtgcgtgacagcacagggagccacagaagggtttctcgaaaaaattactccatggagttcgaaagtatgtctgacacctaaaaagagtgtatatacatgcgcaattagatccaaagaagatgttcccaatttcaaggacaaaatggccagagttatcaagagaaaatttaatacacagtctcaatcttatttaactaaatttctcggtagcacatcaaatgatgttaccacttttcttagcatgcttaacttgactaaatattcataactaatttttattaatgaaataaaactgcatattatacactggttaacgcccttataggctctaaccattttcaagatgaggtccctgattatagtccttctgttcccctccatgtctattagacgatgtgagaagactgaagaggaaacatggggattgaaaatagggttgtgtataattgccaaagatttttatcccgaaagaactgattgcagtgttcatctcccaactgcaagtgaaggattcagggatatacgaaacaccgataaattataaaaaaagcaatgtgtccgctgtttccgttaataatactattttcgtaactggcggattattcataaataactctaatagcacgatcgtggttaacaatatggaaaacttgacatttataaagacaaacaatggtcgattatagaaatgcctatggctagggtatatcacggcatcgactcgacatttggaatgttatattttgccggaggtctatccgttaccgaacaatatggtaatttagagaaaaacaacgagatatcttgttacaatcctagaacgaataagtggtttgatatttcatatactatttataagatatccatatcatcattgtgtaaactaaataacgtcttctatgtatttagtaaggacattggatatgtggaaaagtatgatggtgcatggaagttagtacatgatcgtctccccgctataaaggcattatcaacttctccttattgattgaaaatataaatagtttttatgtatagcagtattaccctatagttttattgcttactactaacatggatacagatacagatacagatacagatacagatacagatacagatgttacaaatgtagaagatatcataaatgaaatagatagagagaaagaagaaatactaaaaaatgtagaaattgaaaataataaaaacattaacaagaatcatcccaatgaatatattagagaagcactcgttattaatacaagtagtaatagtgattccattgataaagaagttatagaatgtatctgtcacgatgtaggaatatagatcatatctactaatttttataatcgatacaaaacataaaaaacaactcgttattacatagcaggcatggaatccttcaagtattgttttgataacgatggcaagaaatggattatcggaaatactttatattctggtaattcaatactctataaggtcagaaaaaatttcactagttcgttctacaattacgtaatgaagatagatcacaaatcacacaagccattgttgtttgaaatacgattctatatatctgtattggatcctttgactatcgacaactggacacgggaacgtggtataaagtatttggctattccagatctgtatggaattggagaaaccgatgattatatgttcttcgttataaagaattcgggaagagtattcgccccaaaggatactgaatcagtcttcgaagcatgcgtcactatgataaacacgttagagtttatacactctcgaggatttacccatggaaaaatagaaccgaggaatatactgattagaaataaacgtctttcactaattgactattctagaactaacaaactatacaagagtggaaactcacatatagattacaacgaggacatgataacttcaggaaatatcaattatatgtgtgtagacaatcatcttggagcaacagtttcaagacgaggagatttagaaatgttgggatattgcatgatagaatggttcggtggcaaacttccatggaaaaacgaaagtagtataaaagtaataaaacaaaaaaaagaatataaaaaatttatagctactttctttgaggactgttttcctgaaggaaatgaacctctggaattagttagatatatagaattagtatacacgttagattattctcaaactcctaattatgacagactacgtaaactgtttatacaagattgaaattatattcttttttttatagagtgtggtagtgttacggatatctaatattaatattagactatctctatcgcgctacacgaccaatatcgattactatggatatcttctatgaaaggagagaatgtattcatttctccagcgtcaatctcgtcagtattgacaatactgtattatggagctaatggatccactgctgaacagctatcgaaatatgtagaaacggaggagaacacggataaggttagcgctcaaaatatctcattcaaatccataaataaagtatatgggcgatattctgccgtgtttaaagattcctttttgagaaaaattggcgataagtttcaaactgttgacttcactgattgtcgcactatagatgcaatcaacaagtgtgtagatatctttactgaggggaaaatcaatccactattggatgaaccattgtctcctagcaattagtgccgtatactttaaagcaaaatggttgacgccattcgaaaaggaatttaccagtgattatcccttttacgtatctccgacggaaatggtagacgtaagtatgatgtctatgtacggcaaggcatttaatcacgcatctgtaaaagaatcattcggcaacttttcaatcatagaactgccatatgttggagatactagtatgatggtcattcttccagacaagattgatggattagaatccatagaacaaaatctaacagatacaaattttaagaaatggtgtgactttatggatgctatgtttatagatgttcacattcccaagtttaaggtaacaggctcgtataatctggtggatactctagtaaagtcaggactgacagaggtgttcggttcaactggagattatagcaatatgtgtaatttagatgtgagtgtcgacgctatgatccacaaaacgtatatagatgtcaatgaagagtatacagaagcagctgcagcaacttctgtactagtggcagactgtgcatcaacaattacaaatgagttctgtgcagatcatccgttcatctatgtgattaggcatgttgatggaaaaattcttttcgttggtagatattgctctccgacaactaattgttaaccattttttttaaaaaaaatagaaaaaacatgtggtattagtgcaggtcgttgttcttccaattgcaattggtaagatgacggccaactttagtacccacgtcttttcaccacagcactgtggatgtgacagactgaccagtattgatgacgtcaaacaatgtttgactgaatatatttattggtcgtcctatgcataccgcaacaggcaatgcgctggacaattgtattccacactcctctcttttagagatgatgcggaattagtgttcatcgacattcgcgagctggtaaaaaatatgccgtgggatgatgtcaaagattgtacagaaatcatccgttgttatataccggatgagcaaaaaaccatcagagagatttcggccatcatcggactttgtgcatatgctgctacttactggggaggtgaagaccatcccactagtaacagtctgaacgcattgtttgtgatgcttgagatgctcaattacgtggattataacatcatattccggcgtatgaattgatgagttgtacatcttgacattttctttcttctcttctccctttcttctcttctccctttcttctcttctcccttcctccctcttctccctttcccagaaacaaacttttttacccactataaaataaaatgagtatactacctattatatttcttcctatatttttttattcttcattcgttcagacttttaacgcgcctgaatgtatcgacaaagggcaatattttgcatcattcatggagttagaaaacgagccagtaatcttaccatgtcctcaaataaatacgctatcatccggatataatatattagatattttatgggaaaaacgaggagcggataataatagaattataccgatagataatggtagcaatatgctaattctgaacccgacacaatcagactctggtatttatatatgcattaccacgaacgaaacctactgtgacatgatgtcgttaaatttgacaatcgtgtctgtctcagaatcaaatatagatcttatctcgtatccacaaatagtaaatgagagatctactggcgaaatggtatgtcccaatattaatgcatttattgctagtaacgtaaacgcagatattatatggagcggacatcgacgccttagaaataagagacttaaacaacggacacctggaattattaccatagaagatgttagaaaaaatgatgctggttattatacatgtgttttagaatatatatacggtggcaaaacatataacgtaaccagaattgtaaaattagaggtacgggataaaataataccttctactatgcaattaccagatggcattgtaacttcaataggtagtaatttgactattgcatgcagagtatcgttgagacctcccacaacggatgcagacgtcttttggataagtaatggtatgtattacgaagaagatgatggggacggagacggtagaataagtgtagcaaataaaatctatatgaccgataagagacgtgttattacatcccggttaaacattaatcctgtcaaggaagaagatgctacaacgtttacgtgtatggcgtttactattcctagcatcagcaaaacagttactgttagtataacgtgaatgtatgttgttacatttccatgtcaattgagtttataagaatttttatacattatcttccaacaaacaattgacgaacgtattgctatgattaactcccacgatactatgcatattattaatcattaacttgcagactatacctagtgctattttgacatactcatgttcttgtgtaattgcagtatctatattattaaagtacgtaaatctagctatagttttattatttaattttagataatataccgtctccttatttttaaaaattgccacatcctttattaaatcatgaatgggaatttctatgtcatcgttagtatattgtgaacaacaagagcagatatctataggaaagggtggaatgcgatacattgatctatgtagttttaaaacacacgcgaactttgaagaatttatataaatcattccatcgatacatccttctatgttgagatgtatatatccaggaattcttttattaatgtcgggaaatgtataaactaaaacattgcccgaaagcggtgcctctatctgcgttatatccgttcttaacttacaaaatgtaaccaatacctttgcatgacttgttttgttcggcaacgttagtttaaacttgacgaatggattaattacaatagcatgatccgcgcatctattaagtttttttactttaacgcccttgtatgtttttacagagactttatctaaatttctagtgcttgtatgtgttataaatataacgggatatagaaccgaatcacctaccttagatacccaattacattttatcagatccagataataaacaaattttgtcgccctaactaattctatattgttatatattttacaattggttatgatatcatgtaataacttggagtctaacgcgcatcgtcgtacgtttatacaattgtgatttagtgtagtatatctacacatgtatttttccgcactatagtattctggactagtgataaaactatcgttatatctgtcttcaatgaactcatcgagatattgctctctgtcatattcatacacctgcataaactttctagacatcttacaatccgtgttattttaggatcatatttacatatttacgggtatatcaaagatgttagattagttaatgggaatcgtctataataatgaatattaaacaattatatgaggacttttaccacaaagcatcataaaaatgagtcgtcgtctgatttatgttttaaatatcaaccgcgaatcaactcataaaatacaagagaatgaaatatatacatattttagtcattgcaatatagaccatacttctacagaacttgattttgtagttaaaaactatgatctaaacagacgacaacctgtaactgggtatactgcactacactgctatttgtataataattactttacaaacgatgtactgaagatattattaaatcatgacgtaaatgtaacgatgaaaaccagtagcggacgtatgcctgtttatatattgcttactagatgttgtaatatttcacatgatgtagtgatagatatgatagacaaagataaaaaccacttattacatagagactattccaacctattactagagtatataaaatctcgttacatgttattaaaggaagaggatatcgatgagaacatagtatccactttattagataagggaatcgatcctaactttaaacaagacggatatacagcgttacattattattatttgtgtctcgcacacgtttataaaccaggtgagtgtagaaaaccgataacgataaaaaaggccaagcgaattatttctttgtttatacaacatggagctaatctaaacgcgttagataattgtggtaatacaccattccatttgtatcttagtattgaaatgtgtaataatattcatatgactaaaatgctgttgacttttaatccgaatttcgaaatatgtaataatcatggattaacgcctatactatgttatataacttccgactacatacaacacgatattcttgttatgttaatacatcactatgaaacaaatgttggagaaatgccgatagatgagcgtcgtatgatcgtattcgagtttatcaaaacatattctacacgtccggcagattcgataacttatttgatgaataggtttaaaaatataaatatttatacccgctatgaaggaaagacattattacacgtagcatgtgaatataataatacacacgtaatagattatcttatacgtatcaacggagatataaatgcgttaaccgacaataacaaacacgctacacaactcattatagataacaaagaaaattccccatataccattaattgtttactgtatatacttagatatattgtagataagaatgtgataagatcgttggtggatcaacttccatctctacctatctttcgtcgcttatcatactagtcatatcctaaatgttgatcatattccaccaaatgattgtgaaagagattgagattaaatcgtctaacaaacaattagtttttatgacattaacatataataaataaattaatcattattgacttaacgatgacgaaagttatcatcatcttaggattcttgattattaatacaaattcattgtctatgaaatgtgaacaaggtgtctcatattataattcacaagaattaaagtgttgtaaactatgtaagccaggaacatattcagatcatcgatgtgataaatacagcgataccatttgtggacattgtccgagtgacacattcacgtcaatatataatcgttctccttggtgtcatagttgtagaggtccatgtggtactaatcgagtagaggtcacaccttgtacacctaccacaaatagaatctgtcattgtgactcgaatagttattgtctccttaaagcttctgatggtaactgtgttacatgtgctcctaaaacaaaatgtggtcgtgggtatggaaagaaaggagaagatgaaatgggtaataccatttgtaagaaatgtcggaagggtacttattcagatattgtatctgactctgatcaatgtaaaccaatgacaagataagacttactcgcatctactggatagacataaaatatcctcctcgtaataatgaaatataaatatacactaattattaatatcaataacaatcgagtattaatatataggtcatttttaaatcccttttgggttccgtcccaaacggcgtttcggtctgcgtcgccgccatggccatgccgagcctctccgcgtgctcctccatcgaggacgacttcaactatggcagctcggtggcgtctgccagcgtgcacatacgaatggcatttctaagaaaagtctacggtatcctttgtctacaatttcttttaacaacggcaacaactgcagtatttttatactttgactgcatgcggacatttatacaagggagtcctgttctaatattggcatcaatgttcggatctataggcttgattttcgcattgactttacacagacataaacatcccctgaatctgtacctgctttgtggatttacactgtcggaatctctaacgctggcctctgttgttactttctatgatgtgcatgtcgttatgcaagctttcatgctgactactgcagcgtttcttgctctgactacatatactctacaatcaaagagagatttcagtaaacttggagcaggattgtttgctgctttgtggattttaattttgtcaggactcttggggatatttgtgcaaaatgagacagtggagctggtcctgtctgcttttggggcccttgtattctgtggattcattatctatgacacgcactcactaatacataagctctcgcctgaagagtatgtgttagcctctatcaatctctacttggatatcatcaatctgttcttgcatctgttgcagcttttggaagtatctaataagaaataaagtttaaaatagaattaataaaaacatataggtcattttttaaacatggattggaaaccaaggtagttagttaatacacacaagatatatttttttcacatcatccacccatgggtaacaccaaggttgttagttaataatatacaagatattttttctcactctgatccatgtaaaccaaggacgagataagacactctcattcctcatccacaacccattaaaaaaatggaaattaaagccctctattagcataaacggctacaggtctacctttacaatggcctctccttgtgcccagttcagaccctgtcattgccacgctactaaggactccctgaataccgtggccgacgtcagacattgtctgactgaatacatcctgtgggtttctcatagatggacccatagagaaagcgcagggtctctctacaggcttctcatctctttcagaactgatgcaacggagctctttggtggtgagttgaaggattcacttccgtgggacaattgcgtggagatcattaaatgtttcatcagaaatgactccatgaaaaccgccgaagaacttcgtgcaatcattggactttgtactcaatcagctatcgtctctggaagagtcttcaacgataagtatatcgacatactacttatgctgcgaaagattctgaacgagaacgactatctcaccctcttggatcatatccgcactgctaaatactaaatctccttcatgctctctcactacactttttatcatcttatgaggaatgattgccttcgtgaaataggaataattagcaccagaatagctatggattattgtggtagagagtgcactattctatgtcgtctactggatgaagatgtgacgtacaaaaaaataaaactagaaattgaaacgtgtcacaacttatcaaaacatatagatagacgaggaaacaatgcgctacattgttacgtctccaataaatgcgatacagacattaagattgttctctcgcggagtcgagagactttgtagaaacaacgaaggattaactccgctaggagtatacagtaagcatagatacgtcaaatctcaaattgtgcatctactgatatccagctattcgaattcctctaacgaactcaagtcgaatataaatgatttcgatctgtattcggataatatcgacttacgtctgctaaaatacctaattgtggataaacggatacgtccgtccaagaatacgaattatgcaatcaatggtctcggattggtggatatatacgtaacgacgcctaatccgagaccagaagtattgctatggcttcttaaatcagaatgttacagcaccggttacgtatttcgtacctgtatgtacgacagtgatatgtgtaagaactctcttcattactatatatcgtctcatagagaatctcaatctctatccaaggatgtaattaaatgtttgatcgataacaatgtttccatccatggcagagacgaaggaggatctttacccatccaatactactggtctttctcaaccatagatatagagattgttaaattattattaataaaggatgtggacacgtgtagagtatacgacgtcagccctatattagaggcgtattatctaaacaagcgatttagagtaaccccatataatgtagacatggaaatcgttaatcttcttattgagagacgtcatactcttgtcgacgtaatgcgtagtattacttcgtacgattccagagaatataaccactacatcatcgataacattctaaagagatttagacaacaggatgtacaagccatactgataaactacttacattacggcgatatggtcgttcgatgcatgttggataacggagcaaccatggataagacgacggacaacaactatcctctacacgactactttgttaataataatctcgtcgatgtaaacgtcgtaaggtttatcgtggaaaatatggacacgcggctgtaaatcacgtatcgaacaatggccgtctatgtatgtacggtctgatattatcgagatttaataattgcgggtatcactgttatgaaaccatactgatagatgtatttgatatactaagcaagtacatggatgatatagatatgatcgataactctactatattacgcggtcgatgtcaataatatacaatttgcaaagcggttattggaatatggagcgagtgtcacgctcgataatcaatacggccatccagaaaagcagttaccaaagagaaaacaaaacgaagctagttgatttattactgagttaccatcccactctagagactatgattgacgcatttaatagagatatacgctatctatatcctgaaccattattcgcctgtatcagatacgccttaatcctagatgatgattttccttctaaagtaaagtatgatatcgccggtcgtcataaggaactaaagcgctatagagtagacattaatagaatgaagaatgtctacatatcaggcgtttccatgtttgatatattatttaaacgaagcaaacgccacagattgagatacgcaaagaatccgacatcaaatggtacaaaaaagaactaacgtccatcattacagaaactgtaaagaacaatgagaggatcgactccatagtggacaacattaatacagacgataacttgatttcgaaattacccatggagatactttattactccattaaataatttatcatggagcgataatgtcctgtttcatttgtttccatgacatattacaaaatcgattccgtccaagatgataaaaacatttaccggcatcataaacacggagtttattttatatgtctcgcataaacattactaaaaaaatatattgttcggtttttctttcacatctttaattatgaaaaagtaaatcattatgagatggacgagattgtacgcatcgttcgcgacagtatgtggtacatacctaacgtatttatggacgacggtaagaatgaaggtcacgtttctgtcaacaatgtctgtcatatgtattttacgttctttgatgtagatacatcgtctcatctgtttaagctagttattaaacactgcgatctgaataaacgaggtaactctccattacattgctatacgatgaatacacgatttaatccatctgtattaaagatattgttacaccacggcatgcgtaactttgatagcaaggatgaccactatcaatcgataacaagatctttgatatactaacggacaccattgatgactttagtaaatcatccgatctattgctgtgttatcttagatataaattcaatgggagcttaaactattacgttctgtacaaaggatccgaccctaattgcgccgacgaggatgaactcacttctcttcattactactgtaaacacatatccacgttctacgaaagcaattattacaagtcaagtcacactaagatgcgagccgagaagcgattcatctacgcgataatagattatggagcaaacattaacgcggttacacacttaccttcaacagtataccaaacatagtcctcgtgtggtgtatgctcttttatctcgaggagccgatacgaggatacgtaataatcttgattgtacacccatcatggaacgattgtgcaacaggtcatattctcataatgttactcaattggcacgaacaaaaggaagaaggacaacatctactttatctattcataaaacataatcaaggatacactctcaatatactacggtatctattagataggttcgacattcagaaagacgaatactataataccgcctttcaaaattgtaacaacaatgttgcctcatacatcggatacgacatcaaccttccgactaaagacggtattcgacttggtgtttgaaaacagaaacatcatatacaaggcggatgttgtgaatgacatcatccaccacagactgaaagtatctctacctatgattaaatcgttgttctacaagatgtctctccctacgacgattactacgtaaaaaagatactagcctactgcctattaagggacgagtcattcgcggaactacatagtaaattctgtttaaacgaggactataaaagtgtatttatgaaaaatatatcattcgataagatagattccatcatcgtgacataagtcgcctcaaagagattcgaatctccgacaccgacctgtatacggtatcacagctatcttaaagccatacattcagacagtcacatttcatttcccatgtacgacgatctcatagaacagtgccatctatcgatggagcgtaaaagtaaactcgtcgacaaagcactcaataaattagagtctaccatcggtcaatctagactatcgtatttgcctccggaaattatgcgcaatatcatctaaacagtatgttgtacggaaagaaccattacaaatattatccatgatagaaagaaaatatctatatgattggagaagtaggaaacaggaacaagacaacgattactacattattaaatcatgaagtccgtattatactcgtatatattgtttctctcatgtataataataaacggaagagatatagcaccgcatgcaccatccgatggaaagtgtaaagacaacgaatacaaacgccataatttgtgtccgggaacatacgcttccagattatgcgatagcaagactaacacacaatgtacgccgtgtggttcgggtaccttcacatctcgcaataatcatttacccgcttgtctaagttgtaacggaagacgcgatcgtgtaacacgactcacaatagaatctgtgaatgctctcccggatattattgtcttctcaaaggatcatccggatgcaaggcatgtgtttcccaaacaaaatgtggaataggatacggagtatccggagacgtcatctgttctccgtgtggtctcggaacatattctcacaccgtctcttccgcagataaatgcgaacccgtacccagaaatacgtttaactatatcgatgtggaaattaacctgtatccagttaacgacacgtcgtgtactcggacgaccactaccggtctcagcgaatccatctcaacgtcggaactaactattactatgaatcataaagactgtaatcccgtctttcgtgatggatacttctccgttcttaataaggtagcgacttcaggtttctttacaggagaaaggtgtgcactctgaatttcgagattaaatgcaataacaaagattcttcctccaaacagttaacgaaagcaaagaatgatactatcatgccgcattcggagacagtaactctagtgggcgacatctatatactatatagtaataccaatactcaagactacgaaactgatacaatctcttatcatgtgggtaatgttctcgatgtcgatagccatatgcccggtagttgcgatatacataaactgatcactaattccaaacccacccactttttatagtaagtttttcacccataaataataaatacaataattaatttctcgtaaaagtagaaaatatattctaatttattgcacggtaaggaagtagaatcataaagaacagtactcaatcaatagcaattatgaaacaatatatcgtcctggcatgcatgtgcctggcggcagctgctatgcctgccagtcttcagcaatcatcctcatcctcctcctcgtgtacggaagaagaaaacaaacatcatatgggaatcgatgttattatcaaagtcacaaagcaagaccaaacaccgaccaatgataagatttgccaatccgtaacggaaattacagagtccgagtcagatccagatcccgaggtggaatcagaagatgattccacatcagtcgaggatgtagatcctcctaccacttattactccatcatcggtggaggtctgagaatgaactttggattcaccaaatgtcctcagattaaatccatctcagaatccgctgatggaaacacagtgaatgctagattgtccagcgtgtccccaggacaaggtaaggactctcccgcgatcactcatgaagaagctcttgctatgatcaaagactgtgaagtgtctatcgacatcagatgtagcgaagaagagaaagacagcgacatcaagacccatccagtactcgggtctaacatctctcataagaaagtgagttacgaagatatcatcggttcaacgatcgtcgatacaaaatgcgtcaagaatctagagtttagcgttcgtatcggagacatgtgcaaggaatcatctgaacttgaggtcaaggatggattcaagtatgtcgacggatcggcatctgaaggtgcaaccgatgatacttcactcatcgattcaacaaaactcaaagcgtgtgtctgaatcgataactctattcatctgaaattggatgagtagggttaatcgaacgattcaggcacaccacgaattaaaaaagtgtaccggacactatattccggtttgcaaaacaaaaatgttcttaactacattcacaaaaagttacctctcgcgacttcttctttttctgtctcaatagtgtgatacgattatgacactattcctattcctattcctatttcctttcagagtatcacaaaaatattaaacctctttctgatggtctcataaaaaaagttttacaaaaatatttttattctctttctctctttgatggtctcataaaaaaagttttacaaaaatatttttattctctttctctctttgatggtctcataaaaaaagttttacaaaaatatttttattctctttctctctttgatggtctcataaaaaaagttttacaaaaatatttttattctctttctctctttgatggtctcataaaaaaagttttacaaaaatatttttattctctttctctctttgatggtctcataaaaaaagttttacaaaaatatttttattctctttctctctttgatggtctcataaaaaaagttttacaaaaatatttttattctctttctctctttgatggtctcataaaaaaagttttacaaaaatatttttattctctttctctctttgatggtctcataaaaaaagttttacaaaaatatttttattctctttctctctttgatggtctcataaaaaaagttttacaaaaatatttttattctctttctctctttgatggtctcataaaaaaagttttacaaaaatatttttattctctttctctctttgatggtctcataaaaaaagttttacaaaaatatttttattctctttctctctttga

SEQ ID NO: 8 - DNA, 188082 bp, Artificial Sequence
  LIVP 7.1.1
atttttgtaaaactttttttatgagaccatcaaagagagaaagagaataaaaatatttttgtaaaactttttttatgagaccatcaaagagagaaagagaataaaaatatttttgtaaaactttttttatgagaccatcaaagagagaaagagaataaaaatatttttgtaaaactttttttatgagaccatcaaagagagaaagagaataaaaatatttttgtaaaactttttttatgagaccatcaaagagagaaagagaataaaaatatttttgtaaaactttttttatgagaccatcaaagagagaaagagaataaaaatatttttgtaaaactttttttatgagaccatcaaagagagaaagagaataaaaatatttttgtaaaactttttttatgagaccatcaaagagagaaagagaataaaaatatttttgtaaaactttttttatgagaccatcaaagagagaaagagaataaaaatatttttgtaaaactttttttatgagaccatcaaagagagaaagagaataaaaatatttttgtaaaactttttttatgagaccatcaaagagagaaagagaataaaaatatttttgtaaaactttttttatgagaccatcaaagagagaaagagaataaaaatatttttgtaaaactttttttatgagaccatcaaagagagaaagagaataaaaatatttttgtaaaactttttttatgagaccatcagaaagaggtttaatatttttgtgataccctgaaaggaaataggaataggaataggaataggaatagtgtcataatcgtatcacactattgagacagaaaaagaagaagtcgcgagaggtaactttttgtgaatgtagttaagaacatttttgttttgcaaaccggaatatagtgtccggtacacttttttaattcgtggtgtgcctgaatcgttcgattaaccctactcatccaatttcagatgaatagagttatcgattcagacacacgctttgagttttgttgaatcgatgagtgaagtatcatcggttgcaccttcagatgccgatccgtcgacatacttgaatccatccttgacctcaagttcagatgattccttgcacatgtctccgatacgaacgctaaactctagattcttgacacattttgtatcgacgatcgttgaaccgatgatatcttcgtaactcactttcttatgagagatgttagacccgagtactggatgggtcttgatgtcgctgtctttctcttcttcgctacatctgatgtcgatagacacctcacagtctttgatcatagcaagagcttcttcacgagtgatcgcgggagagtccttaccttgtcctggggacacgctggacaatctagcattcactgtgtttccatcagcggattctgagatggatttaatctgaggacatttggtgaatccaaagttcattctcagacctccaccgatgatggagtaataagtggtaggaggatctacatcctcgactgatgtggaatcatcttctgattccacctcgggatctggatctgactcggactctgtaatttccgttacggattggcaaatcttatcattggtcggtgtttggtcttgctttgtgactttgataataacatcgattcccatatgatgtttgttttcttcttccgtacacgaggaggaggatgaggatgattgctgaagactggcaggcatagcagctgccgccaggcacatgcatgccaggacgatatattgtttcataattgctattgattgagtactgttctttatgattctacttccttaccgcgcaataaattagaatatattttctacttttacgagaaattaattattgtatttattatttatgggtgaaaaacttactataaaaagtgggtgggtttggaattagtgatcagtttatgtatatcgcaactaccgggcatatggctatcgacatcgagaacattacccacatgataagagattgtatcagtttcgtagtcttgagtattggtattactatatagtatatagatgtcgcccactagagttactgtctccgaatgcggcatgatagtatcattctttgctttcgttaactgtttggaggaagaatctttgttattgcatttaatctcgaaattcagagtgcacacctttctcctgtaaagaatcctgaagttgctaccttattaagaacggagaagtatccatcacgaaatacgggattacagtctttatgattcatagtaatagttagttccgacgttgagatggattcgctgagaccggtagtggtcgtccgagtacacgacgtgtcgttgacgggatacagattaatttccacatcgatatagttaaacgtattactgggtacgggttcgcatttatctgcggaagagacggtgtgagaatatgttccgagaccacacggagaacagatgacgtctccggatactccgtatcctattccacattttgtttgggaaacacatgccttgcatccggatgatcctttgagaagacaataatatccgggagagcattcacagattctattgtgagtcgtgttacacgatcgcgtcttccgttacaacttagacaagcgggtaaatgattattgcgagatgtgaaggtacccgaaccacacggcgtacatcgtgtgttagtcttgctatcgcataatctggaagcgtatgttcccggacacaaattatggcgtttgtattcgttgtctttacactttccatcggatggtgcatgcggtgctatatctcttccgtttattattatacatgagagaaacaatatatacgagtataatacggacttcatgatttaataatgtagtaatcgttgtcttgttcctgtttcctacttctccaatcatatagatattttctttctatcatggataatatttgtaatggttctttccgtacaacatactgtttagatgatattgcgcataatttccggaggcaaatacgatagtctagattgaccgatggtagactctaatttattgagtgctttgtcgacgagtttacttttacgctccatcgatagatggcactgttctatgagatcgtcgtacatgggaaatgaaatgtgactgtctgaatgtatggctttaagatagctgtgataccgtatacaggtcggtgtcggagattcgaatctctttgaggcgacttatgtcacgatgatggaatctatcttatcgaatgatatatttttcataaatacacttttatagtcctcgtttaaacagaatttactatgtagttccgcgaatgactcgtcccttaataggcagtaggctagtatcttttttacgtagtaatcgtcgtagggagagacatcttgtagaacaacgatttaatcataggtagagatactttcagtctgtggtggatgatgtcattcacaacatccgccttgtatatgatgtttctgttttcaaacaccaagtcgaataccgtctttagtcggaaggttgatgtcgtatccgatgtatgaggcaacattgttgttacaattttgaaaggcggtattatagtattcgtctttctgaatgtcgaacctatctaatagataccgtagtatattgagagtgtatccttgattatgttttatgaatagataaagtagatgttgtccttcttccttttgttcgtgccaattgagtaacattatgagaatatgacctgttgcacaatcgttccatgatgggtgtacaatcaagattattacgtatcctcgtatcggctcctcgagataaaagagcatacaccacacgaggactatgtttggtatactgttgaaggtaagtgtgtaaccgcgttaatgtttgctccataatctattatcgcgtagatgaatcgcttctcggctcgcatcttagtgtgacttaacttgtaataattgctttcgtagaacgtggatatgtgtttacagtagtaatgaagagaagtgagttcatcctcgtcggcgcaattagggtcggatcctttgtacagaacgtaatagtttaagctcccattgaatttatatctaagataacacagcaatagatcggatgatttactaaagtcatcaatggtgtccgttagtatatcaaagatcttgttatcgattgatagtggtcatccttgctatcaaagttacgcatgccgtggtgtaacaatatctttaatacagatggattaaatcgtgtattcatcgtatagcaatgtaatggagagttacctcgtttattcagatcgcagtgtttaataactagcttaaacagatgagacgatgtatccacatcaaagaacgtaaaatacatatgacagacattgttgacagaaacgtgaccttcattcttaccgtcgtccataaatacgttaggtatgtaccacatactgtcgcgaacgatgcgtacaatctcgtccatctcataatgatttactttttcataattaaagatgtgaaagaaaaccgaacaatatatttttttagtaatgtttatgcgagacatataaaataaactccgtgtttatgatgccggtaaatgtttttatcatcttggacggaatcgattttgtaatatgtcatggaaacaaatgaaacaggacattatcgctccatgataaattatttaatggagtaataaagtatctccatgggtaatttcgaaatcaagttatcgtctgtattaatgttgtccactatggagtcgatcctctcattgttctttacagtttctgtaatgatggacgttagttcttttttgtaccatttgatgtcggattctttgcgtatctcaatttgtggcgtttgcttcgtttaaataatatatcaaacatggagacgcctgatatgtagacattcttcattctattaatgtctactctatagcgctttagttccttatgacgaccggcgatatcatactttactttagaaggaaaatcatcatctaggattaaggcgtatctgatacaggcgaataatggttcaggatatagatagcgtatatctctattaaatgcgtcaatcatagtctctagagtgggatggtaactcagtaataaatcaactagcttcgttttgttttctctttggtaactgcttttctggatggccgtattgattatcgagcgtgacactcgctccatattccaataaccgctttgcaaattgtatattattgacatcgaccgcgtaatatagtagagttatcgatcatatctatatcatccatgtacttgcttagtatatcaaatacatctatcagtatggtttcataacagtgatacccgcaattattaaatctcgataatatcagaccgtacatacatagacggccattgttcgatacgtgatttacagccgcgtgtccatattttccacgataaaccttacgacgtttacatcgacgagattattattaacaaagtagtcgtgcagaggatagttgttgtccgttatctaacatgcatcgaacgaccatatcgccgtaatgtaagtagtttatcaacatggcttgtacatcctgttgtctaaatctctttagaatgttatcgatgatgtagtggttatattctctggaatcgtacgaagtaatactacgcattacgtcgacaagagtatgacgtctctcaataagaagattaacgatttccatgtctacattatatggggttactctaaatcgcttgtttagataatacgcctctaatatagggctgacgtcgtatactctacacgtgtccacatcctttattaataataatttaacaatctctatatctatggttgagaaagaccagtagtattggatgggtaaagatcctccttcgtctctgccatggatggaaacattgttatcgatcaaacatttaattacatccttggatagagattgagattctctatgagacgatatatagtaatgaagagagttcttacacatatcactgtcgtacatacaggtacgaaatacgtaaccggtgctgtaacattctgatttaagaagccatagcaatacttctggtctctcgttacgtatatatccaccaatccgagaccattgattgcataattcgtattcttggacggacgtatccgtttatccacaattaggtattttagcagacgtaagtcgatattatccgaatacagatcgaaatcatttatattcgacttgagttcgttagaggaatttgaatagctggatatcagtagatgcacaatctgagattttacgtatctatgcttactgtatactcctagcggagttaatccttcgttgtttctacaaagtctctcgactccgcgagagaacaatcttaatgtctgtatcgcatttattggagacgtaacaatgtagcgcattgtttcctcgtctatctatatgttttgataagttgtgacacgtttcaatttctagttttatttttttgtacgtcacatcttcatccagtagacgacatagaatagtgcactctctaccacaataatccatagctattctggtgctaattattcctatttcacgaaggcaatcattcctcataagatgataaaaagtgtagtggagatttagtatttagcagtgcggatatgatccaagagggtgagatagtcgttctcgttcagaatctttcgcagcataagtagtatgtcgatatacttatcgttgaagactctttataaaagtctatttgtttatatttattgcggatagcagtatttccctataaaaagtatacgtcctgtggtgtctttaatcatgtacatgaatggatggtttatgtagaccttcgtacgatataccatcgaaaagttaatcgtaaatactcctgtaacggccgatgcttctgtatactcctcattaacatctataaacgtcgtatgtagaaatttttctacagtgatagtttcattacacatcttgctaaaatctgcataatatccgaatatattagtaagtcctaaattttctaaaatcggtaccagattatacggttctgtcatttccactttaaactttggcatatacaagtctatacttttagtagataacataccacaccattttttaaatttttcatctgttatatttttttctatgttatatataccttctatgtcgtccggtagtataatcaccatactagagtttccctcgtatggaatatcgataatagagaatcctccgaataattcattaatatgtacatattgcaagttattctcggtacccaccatcatatcaacgctggtaactatattcttagaaatataaaacttgtctgtatatgtaagatgtttagaaaatggatatttccacattgctttaaaatggacggcgctaacaactgtcatacgagtattaatggatagcggactagtcaataaggaattaattttaccatttgtcattgtcttaacccattcgttgattagttcctttgtttggttagcattattaaagtttacagtttgaaaatcgtcttttattttttgtaggaaggaggcgtggaactcgatactatcgctaccgtatattttatttgcggtagctagtgtcgcacaatacggaatatctacctccatgtcatcattattgtcatcgggtgtattctcattcatattctctatatattttgatagttgttcagctgtagaaccagctgctccatgatttagaatagataaagtagataaaatggaaactggagaaatcaaaacattttcatcagggtgttttaagattagttctttaaagatatccatggtatagacctaacgataacgatatatatcataaataaataatgttaaatttcaatttatgtttgtaccccgtattcatacttaacaaattggtattgcgtacacaatcaatcatattacataccattaataatgcaagcataaaaaattgttagtagatgtttctaaatataggttccgtaagcaaagaatataagaatgaagcggtaatgataaaatcaatcgttatctaaaatgatcatactcatttattttattctattatattaacacatacatttttaacagcaacacattcaatattgtattgttatttttatattatttacacaattaacaatatattattagtttatattactgaattaataatataaaattcccaatcttgtcataaacacacactgagaaacagcataaacacagaatccatcaaaaatgttgataaattatctgatgttgttgttcgctgctatgataatcagatcattcgccgatagtggtaacgctatcgaaacgacattgccagaaattacaaacgctacaacagatattccagctatcagattatgcggtccagagggagatggatattgtttacacggtgactgtatccacgctagagatattgacggtatgtattgtagatgctctcatggttatacaggcattagatgtcagcatgtagtattagtagactatcaacgttcagaaaacccaaacactacaacgtcatatatcccatctcccggtattatgcttgtattagtaggcattattatgtgttgtctattatctgtttataggttcactcgacgaactaaactacctatacaagatatggttgtgccataatttttataaatttttttatgagtatttttacaaaaatgtataaagtgtatgtcttatgtatatttataaaaatgctaagtatgcgatgtatctatgttatttgtatttatctaaacaatacctctacctctagatattatacaaaaattttttatttcggcatattaaagtaaaatctagttaccttgaaaatgaatacagtgggtggttccgtatcaccagtaagaacataatagtcaaatacagtatccgattgagattttgcatacaatactagtctagaaagaaatttgtaatcatcttctgtgacgggagtccatatatctgtatcatcgtctagtttatcagtgtcccatgctatattcctgttatcatcattagttaatgaaaataactctcgtgcttcagaaaagtcaaatattgtatccatacatacatctccaaaactatcgcttatacgtttatctttaacgatacctatacctagatggttatttactaacagacattttccagatctattgactataactcctatagtttccacatcaaccaagtaatgatcatctattgttatataacaataacataactcttttccatttttatcagtatgtatatctatatcaacgtcgtcgttgtagtgaatagtagtcattgatctattatatgaaacggatatgtctagaacggcaattgttttacgtccagttaacactttcgttgatttaaagtctagagtctttgcaaacataatatccttatccgactttatatttcctgtagggtggtataattttattttgcctccacatatcggtgtttccaaatatattactagacaatattccatatagttattagttaagggtacccaattagaacacgtacgcttattatcatcatttggatcgtatttcataaaagttattgtgttatcgatgtcaacacattctacattttttaatcgtctatatagtatttttctgatattttctataatatcagaattgtcttccatcggaagttgtatactatcggaatcagttacatgtttaaataattctctgatgtcattccttatacaatcaaattcattattaaacagtttaatagtctgtagacctttatcgtcgtaaatatccattgtcttattagttacgcttatttttatgtgtttttacgttgctttattatattttataagaatgattgtttgacgaatcacgagaactattaagacacattattaggtatatattataaaaaagtttttgattacgatgttataagaggaaagaggacacattaacatcatacatcaattaactacattcttataacatcgtaatcaaaagaattgcaattttgatgtataacaactgtcaatgggttatggaattgtatattacatattatacggtatgttggtaacgacaaataccggtcggtaattgtctgccggtgtaatagaattatatatatctatctattacaccggccttgtatacataataataagttgtggtagtatgatctccatatttataatttaggactttgtattcagtatttttggaatcataaaaaataaaaaaaagttttactaatttaaaatttaaaaagtatttacatttttttcactgtttagtcgcggatatggaattcgatcctgccaaaatcaatacatcatctatagatcatgtaacaatattacaatacatagatgaaccaaatgatataagactaacagtatgcattatccgaaatattatatcaatatcacaaaaataaatacacatttggctaatcaatttcgggcttggaaaaaacgtatcgccggaagggactatatgactaacttatctagagatacaggaatacaacaatcaaaacttactgaaactatacgtaactgtcaaaaaaatagaaacatatatggtctatatatacactacaatttagttattaattggataaccgatgtgattatcaatcaatattaagagggttggtaaattggtacatagctaataatacctatacacccaataatacaacaaccatttctgagttggatatcatcaaaatactggataaatacgaggacgtgtatagagtaagtaaagaaaaagaatgtggaatttgctatgaagttgtttactcaaaacgatagatactttggtttattggattcgtgtactcatatattttgcataacatgcatcaatatatggcatagaacacgaagagaaaccggtgcgtcggataattgtcctatatgccgtacccgttttagaaacataacaatgagcaagttctataagctagttaactaataaataaaaagtttaatttgttgacgacgtatgtcgttatttttctcgtatgaaagattaaattcaattcaattcgttgtttctaatataatctgccgtattggatggattctcaagacaattgcatttagattatattatcatgaataaaaatagtagcacacaactacttcagcaaatattcttttttgaaacgccatctatcgtagtgaggacacaagtgaacctataatgagcaaatttattagtatcagtcacatgaaggactttctgtagagtgacgattccactatctgtggtacgaacggtttcatcttctttgatgccatcacccagatgttctataaacttggtatcctcgtccgatttcatatcctttgccaaccaatacatatagctaaactcaggcatatgttccacacatcctgaacaatgaaattctccagaagatgttacaatgtctagatttggacatttggtttcaaccgcgttaacatatgagtgaacacacccatacatgaaagcgatgagaaataggattctcatcttgccaaaatatcactagaaaaaatttatttatcagttttaaaggtataaaaaatacttattgttgctcgaatattttgtatttgatggtatacggaagattagaaatgtaggtattatcatcaactgattctatggttttatgtattctatcatgtttcactattgcgttggaaataatatcatatgcttccacatatattttattttgttttaactcataatactcacgtaattctggattattggcatatctatgaataattttagctccatgatcagtaaatattaatgagaacatagtattaccacctaccattatttttttcatctcattcaattcttaattgcaaagatctatataatcattatagcgttgacttatggactctggaatcttagacgatgtacagtcatctataatcatggcatatttaatacattgttttatagcatagtcgttatctacgatgttagatatttctctcaatgaatcaatcacataatctaatgtaggtttatgacataatagcattttcagcagttcaatgtttttagattcgttgatggcaatggctatacatgtatatccgttatttgatctaatgttgacatctgaaccggattctagcagtaaagatactagagattgtttattatatttaacagccttgtgaagaagtgtttctcctcgtttgtcaatcatgttaatgtctttaagataaggtaggcaaatgtttatagtactaagaattgggcaagcataagacatgtcacaaagaccctttttgtatgtataagtgtagaaattataacatccatagttggatttacataggtgtccaatcgggatctctccatcatcgagataattgatggcatctcccttccttttttagtagatatttcatcgtgtaagaatcaatattaatatttctaaagtatccgtgtatagcctctttatttaccacagttccatattccactagagggatatcgccgaatgtcatatactcaattagtatatgttggaggacatccgagttcattgttttcaatatcaaagagatggtttccttatcatttctccatagtggtacaatactacacattatttcgtgcggctttccattttccaaaaacaatttgaccaaatctacatctttattgtatctataatcactatttagataatcagccataattactcgagtgcaacatgttagatcgtctatatatgaataagccgtgttatctattcctttcattaacaatttaacgatgtctatatctatatgagatgacttaatataatattgaagagctgtacaatagtttttatctataaaagacggcttgattccgtgattaattagacatttaacaacttccggacgcacatatgctctcgtatccgactctgaatacagatgagagatgatatacagatgcaatacggtaccgcaatttcgtagttgataatcatcatacgcgtatcagtactcgtcctcataaagaacactgcagccattttctatgaacaaatcaataattttaggaacaggatcattgtcattacataattttctataactgaacgatggttttcacatttaacactcaagtcaaatccatgttctaccaacacctttatcaagtcaacgtctacatttttggatttcatatagctgaatatattaaagtcatttatgttgctaaatccagtggcttctagtagagccatcgctatatcctttaactttaacatgtctactatttgtgtattcttctaatggggtagctgtctccaatttttgcgtaatggattagtgccactgtctagtagtagtttgacgacctcgacattattacaatgctcattaaaaaggtatgcgtgtaaagcattattcttgaattggttcctggtatcattaggatctctgtctttcaacatctgtttaagttcatcaagagccacctcctcattttccaaatagtcaaacattttgactgaatgagctactgtgaactctatacacccacacaactaatgtcattaaatatcatgtcaaaaacttgtacaattattaataaaaataatttagtgtttaaattttaccagttccagattttacacctccgttaatacctccattaaccccactggacgatcctcctccccacattccaccgccaccagatgtataagttttagatcctttattactaccatcatgtccatggataaagacactccacatgccgccactaccccctttagaagacatattaataagacttaaggacaagtttaacaataaaattaatcacgagtaccctactaccaacctacactattatatgattatagtttctatttttacagtaccttgactaaagtttctagtcacaagagcaatactaccaacctacactattatatgattatagtttctatttttataggaacgcgtacgagaaaatcaaatgtctaatttctaacggtagtgttgataaacgattgttatccgcggatacctcctctatcatgtcgtctattttcttactttgttctattaacttattagcattatatattatttgattataaaacttatattgcttattagcccaatctgtaaatatcggattattaacatatcgtttctttgtaggtttatttaacatgtacatcactgtaagcatgtccttaccatttattttaatttgacgcatatccgcaatttctttttcgcagtcggttataaattctatatatgatggatacatgctacatgtgtacttataatcgactaatatgaagtacttgatacatattttcagtaacgatttattattaccacctatgaataagtacctgtgatcgtctaggtaatcaactgttttcttaatacattcgatggttggtaatttactcagaataatttccaatatcttaatatataattctgctatttctgggatatatttatctgccagtataacacaaatagtaatacatgtaaacccatattttgttattatattaatgtctgcgccattatctattaaccattctactaggctgacactatgcgactcaatacaatgataaagtatactacatccatgtttatctattttgtttatatcatcaatatacggcttacaaagttttagtatcgataacacatccaactcacgcatagagaaggtagggaataatggcataatatttattaggttatcatcattgtcattatctacaactaagtttccattttttaaaatatactcgacaactttaggatctctattgccaaatttttgaaaatatttatttatatgcttaaatctatataatgtagctccttcatcaatcatacatttaataacattgatgtatactgtatgataagatacatattctaacaatagatcttgtatagaatctgtatatcttttaagaattgtggatattaggatattattacataaactattacacaattctaaaatataaaacgtatcacggtcgaataatagttgatcaactatataattatcgattttgtgatttttcttcctaaactgtttacgtaaatagttagatagaatattcattagttcatgaccactatagttactatcgaataacgcgtcaaatatttcccgtttaatatcgcatttgtcaagataataatagagtgtggtatgttcacgataagtataataacgcatctctttttcgtgtgaaattaaatagtttattacgtccaaagatgtagcataaccatcttgtgacctagtaataatataataatagagaactgttttacccattctatcatcataatcagtggtgtagtcgtaatcgtaatcgtctaattcatcatcccaattataatattcaccagcacgtctaatctgttctattttgatcttgtatccatactgtatgttgctacatgtaggtattcctttatccaataatagtttaaacacatctacattgggatttgatgttgtagcgtatttttctacaatattaataccatttttgatactatttatttctatacctttcgaaattagtaatttcaataagtctatattgatgttatcagaacatagatattcgaatatatcaaaatcattgatatttttatagtcgactgacgacaataacaaaatcacaacatcgtttttgatattattatttttcttggtaacgtatgcctttaatggagtttcaccatcatactcatataatggatttgcaccactttctatcaatgattgtgcactgctggcatcgatgttaaatgttttacaactatcatagagtatcttatcgttaaccatgattggttgttgatgctatcgcattttttggtttctttcatttcagttatgtatggatttagcacgtttgggaagcatgagctcatatgatttcagtactgtagtgtcagtactattagtttcaataagatcaatctctagatctatagaatcaaaacacgataggtcagaagataatgaatatctgtaggcttcttgttgtactgtaacttctggttttgttagatggttgcatcgtgctttaacgtcaatggtacaaattttatcctcgctttgtgtatcatattcgtccctactataaaattgtatattcagattatcatgcgatgtgtatacgctaacggtatcaataaacggagcacaccatttagtcataaccgtaatccaaaaatttttaaagtatatcttaacgaaagaagttgtgtcattgtctacggtgtatggtactagatcctcataagtgtatatatctagagtaatgtttaatttattaaatggttgataatatggatcctcgtgacaatttccgaagatggaaataagacataaacacgcaataaatctaattgcggacatggttactccttaaaaaaatacgaataatcaccttggctatttagtaagtgtcatttaacactatactcatattaatccatggactcataatctctatacgggattaacggatgttctatatacggggatgagtagttctcttctttaactttatactttttactaatcatatttagactgatgtatgggtaatagtgtttgaagagctcgttctcatcatcagaataaatcaatatctctgtttttttgttatacagatgtattacagcctcatatattacgtaatagaacgtgtcatctaccttattaactttcaccgcatagttgtttgcaaatacggttaatcctttgacctcgtcgatttccgaccaatctgggcgtataatgaatctaaactttaattgcttgtaatcattcgaaataatttttagtttgcatccgtagttatcccctttatgtaactgtaaatttctcaacgcgatatctccattaataatgatgtcgaattcgtgctgtatacccatactgaatggatgaacgaataccgacggcgttaatagtaatttactttttcatctttacatattgggtactagttttactatcataagtttataaattccacaagctactatggaataagccaaccatcttagtataccacacatgtcttaaagtttattaattaattacatgttgttttatatatatcgctacgaatttaaagagaaattagtttaggaagaaaaattatctatctacatcatcacgtctctgtattctacgatagagtgctactttaagatgcgacagatccgtgtcatcaaatatatactccattaaaatgattattccggcagcgaacttgatattggatatatcacaacctttgttaatatctacgacaatagacagcagtcccatggttccataaacagtgagtttatctttctttgaagagatattttgtagagatcttataaaactgtcgaatgacatcgcatttatatctttagctaaatcgtatatgttaccatcgtaatatctaaccgcgtctatcttaaacgtttccatcgctttaaagacgtttccgatagatggtctcatttcatcagtcatactgagccaacaaatataatcgtgtataacatctttgatagaatcagactctaaagaaaacgaatcggctttattatacgcattcatgataaacttaatgaaaaatgtttttcgttgtttaagttggatgaatagtatgtcttaataattgttattatttcattaattaatatttagtaacgagtacactctataaaaacgagaatgacataactaatcataactagttatcaaagtgtctaggacgcgtaattttcatatggtatagatcctgtaagcattgtctgtattctggagctattttctctatcgcattagtgagttcagaatatgttataaatttaaatcgaataacgaacataactttagtaaagtcgtctatattaactcttttattttctagccatcgtaataccatgtttaagatagtatattctctagttactacgatctcatcgttgtctagaatatcacatactgaatctacatccaattttagaaattggtctgtgttacatatctcttctatattattgttgatgtattgtcgtagaaaactattacgtagaccattttctttataaaacgaatatatagtactccaattatctttaccgatatatttgcacacataatccattctctcaatcactacatctttaagattttcgttgttaagatatttggctaaactatataattctattagatcatcaacagaatcagtatatatttttctagatccaaagacgaactctttggcgtcctctataatattcccagaaaagatattttcgtgttttagtttatcgagatctgatctgttcatatacgccatgattgtacggtacgttatgataaccgcataaaataaaaatccattttcatttttaaccaatactattcataattgagattgatgtaatactttgttactttgaacgtaaagacagtacacggatccgtatctccaacaagcacgtagtaatcaaatttggtgttgttaaacttcgcaatattcatcaatttagatagaaacttatactcatcatctgttttaggaatccatgtattattaccactttccaacttatcattatcccaggctatgtttcgtccatcatcgttgcgcagagtgaataattcttttgtattcggtagttcaaatatatgatccatgcatagatcggcaaagctattgtagatgtgatttttcctaaatctaatataaaactcgtttactagcaaacactttcctgatttatcgaccaagacacatatggtttctaaatctatcaagtggtggggatccatagttatgacgcagtaacatatattattacattcttgactgtcgctaatatctaaatatttattgttatcgtattggattctgcatatagatggcttgtatgtcaaagatatagaacacataaccaatttatagtcgcgctttacattctcgaatctaaagttaagagatttagaaaacattatatcctcggatgatgttatcactgtttctggagtaggatatattaaagtctttacagatttcgtccgattcaaataaatcactaaataatatcccacattatcatctgttagagtagtatcattaaatctattatattttatgaaagatatatcactgctcacctctatatttcgtacatttttaaactgtttgtataatatctctctgatacaatcagatatatctattgtgtcggtagacgataccgttacatttgaattaatggtgttccattttacaacttttaacaagttgaccaattcatttctaatagtatcaaactctccatgattaaatattttaatagtatccattttatatcactacggacacaaagtagctgacataaaccattgtataatttttatgttttatgtttattagcgtacacattttggaagttccggcttccatgtatttcctggagagcaagtagatgatgaggaaccagatagtttatatccgtacttgcacttaaagtctacattgtcgttgtatgagtatgatcttttaaacccgctagacaagtatccgtttgatattgtaggatgtggacatttaacaatctgacacgtgggtggatcggaccattctcctcctgaacacaggacactagagttaccaatcaacgaatatccactattgcaactataagttacaacgctcccatcggtataaaaatcctcgtatccgttatgtcttccgttggatatagatggaggggattggcatttaacagattcacaaataggtgcctcgggattccataccatagatccagtagatcctaattcacaatacgatttagattcaccgatcaactgatatccgctattacaagagtacgttatactagagccaaagtctactccaccaatatcaagttggccattatcgatatctcgaggcgatgggcatctccgtttaatacattgattaaagagtgtccatccagtacctgtacatttagcatatataggtcccattttttgctttctgtatccaggtagacatagatattctatagtgtctcctatgttgtaattagcattagcatcagtctccacactattcttaaatttcatattaatgggtcgtgacggaatagtacagcatgatagaacgcatcctattcccaacaatgtcaggaacgtcacgctctccaccttcatatttatttatccgtaaaaatgttatcctggacatcgtacaaataataaaaagcccatatatgttcgctattgtagaaattgtttttcacagttgctcaaaaacgatggcagtgacttatgagttacgttacactttggagtctcatctttagtaaacatatcataatattcgatattacgagttgacatatcgaacaaattccaagtatttgattttggataatattcgtattttgcatctgctataattaagatataatcaccgcaagaacacacgaacatctttcctacatggttaaagtacatgtacaattctatccatttgtcttccttaactatatatttgtatagataattacgagtctcgtgagtaattccagtaattacatagatgtcgccgtcgtactctacagcataaactatactatgatgtctaggcatgggagacttttttatccaacgatttttagtgaaacattccacatcgtttaatactacatatttctcatacgtggtataaactccacccattacatatatatcatcgtttacgaataccgacgcgcctgaatatctaggagtaattaagtttggaagtcttatccatttcgaagtgccgtgtttcaaatattctgccacacccgttgaaatagaaaattctaatcctcctattacatataactttccatcgttaacacaagtactaacttctgattttaacgacgacatattagtaaccgttttccattttttcgttttaagatctacccgcgatacggaataaacatgtctattgttaatcatgccgccaataatgtatagacaattatgtaaaacatttgcattatagaattgtctatctgtattaccgactatcgtccaatattctgttctaggagagtaatgggttattgtggatatataatcagagtttttaatgactactatattatgttttataccatttcgtgtcactggctttgtagatttggatatagttaatcccaacaatgatatagcattgcgcatagtattagtcataaacttgggatgtaaaatgttgatgatatctacatcgtttggatttttatgtatccactttaataatatcatagctgtaacatcctcatgatttacgttaacgtcttcgtgggataagatagttgtcagttcatcctttgataattttccaaattctggatcggatgtcaccgcagtaatattgttgattatttctgacatcgacgcattatatagttttttaattccatatcttttagaaaagttaaacatccttatacaatttgtgaaattaatattatgaatcatagtttttacacatagatctactacaggcggaacatcaattattatggcagcaactagtatcatttctacattgtttatggtgatgtttatcttcttccagcgcatatagtctaatagcgattcaaacgcgtgatagtttataccattcaatataatcgcttcatcctttagatggtgatcctgaatgcgtttaaaaaaattatacggagacgccgtaataatttccttattcacttgtataatttccccattgatagaaaatattacgctttccattcttaaagtactataagtaattatagtataatgtaaacgtttatatattcaatatttttataaaaatcattttgacattaattcctttttaaatttccgtctatcatctatagaaacgtattctatgaatttataaaatgcttttacgtgtcctatcgtaggcgatagaaccgctaaaaagcctatcgaatttctacaaaagaatctgttatatggtatagggagagtataaaacattaaatgtccgtacttattaaagtattcagtagccaatcctaactctttcgaatacttattaatggctcttgttctgtacgaatctatttttttgaacaacggacctagtggtatatcttgttctatgtatctaaaataatgtctgactagatccgttagtttaatatccgcagtcatcttgtctagaatggcaaatctaactgcgggtttaggctttagtttagtttctatatctacatctatgtctttatctaacaccaaaaatataatagctaatattttattacaatcatccggatattcttctacgatctcactaactaatgtttctttggttatactagtatagtcactatcggacaaataaagaaaatcagatgatcgatgaataatacatttaaattcatcatctgtaagatttttgagatgtctcattagaatattattagggttagtactcattatcattcggcagctattacttattttattatttttcaccatatagatcaatcattagatcatcaaaatatgtttcaatcatcctaaagagtatggtaaatgactcttcccatctaatttctgaacgttcaccaatgtctctagccactttggcactaatagcgatcattcgcttagcgtcttctatattattaactggttgattcaatctatctagcaatggaccgtcggacagcgtcattctcatgttcttaatcaatgtacatacatcgccgtcatctaccaattcatccaacaacataagctttttaaaatcatcattataataggtttgatcgttgtcatttctccaaagaatatatctaataagtagagtcctcatgcttagttaacaactattttttatgttaaatcaattagtacaccgctatgtttaatacttattcatattttagtttttaggattgagaatcaatacaaaaattaatgcatcattaattttagaaatacttagtttccacgtagtcaatgaaacatttgaactcatcgtacaggacgttctcgtacaggacgtaactataaaccggtttatatttgttcaagatagatacaaatccgataactttttttacgaattctacgggatccactttaaaagtgtcataccgggttctttttatttttttaaacagatcaatggtgtgatgttgattaggtcttttacgaatttgatatagaatagcgtttacatatcctccataatggtcaatcgccatttgttcgtatgtcataaattctttaattatatgacactgtgtattatttagttcatccttgttcattgttaggaatctatccaaaatggcaattatactagaactataggtgcgttgtatacacatattgatgtgtctgtttatacaatcaatgctactaccttcgggtaaaattgtagcatcatataccatttctagtactttaggttcattattatccattgcagaggacgtcatgatcgaatcataaaaaaatatattatttttatgttattttgttaaaaataatcatcgaatacttcgtaagatactccttcatgaacataatcagttacaaaacgtttatatgaagtaaagtatctacgatttttacaaaagtccggatgcataagtacaaagtacgcgataaacggaataataatagatttatctagtctatctttttctatagctttcatagttagatacatggtctcagaagtaggattatgtaacatcagcttcgataaaatgactgggttatttagtcttacacattcgctcatacatgtatgaccgttaactacagagtctacactaaaatgattgaacaatagatagtctaccattgtttcgtattcagatagtacagcgtagtacatggcatcttcacaaattatatcattgtctaatagatatttgacgcatcttatggatcccacttcaacagccatcttaaaatcggtagaatcatattgctttcctttatcattaataatttctagaacatcatctctatcataaaagatacaaatattaactgtttgatccgtaataacattgctagtcgatagcaatttgttaataagatgcgctgggctcaatgtcttaataagaagtgtaagaggactatctccgaatttgttttgtttattaacatccgttgatggaagtaaaagatctataatgtctacattcttgactgttttagagcatacaatatggagaggtgtatttccatcatgatctggttttgagggactaattcctagtttcatcatccatgagattgtagaagcttttggattgtctgacataagatgtctatgaatatgatttttgccaaatttatccactatcctggcttcgaatccgatggacattatttttttaaacactctttctgaaggatctgtacacgccaacaacggaccacatccttcttcatcaaccgagttgttaatcttggctccatactgtaccaataaatttattctctctatgacttcatcatctgttcccgagagataatatagaggcgttttatgctgtttatcacacgcgtttggatctgcgccgtgcgtcagcagcatcgcgactattctattattattaattttagaagctatatgcaatggataatttccatcatcatccgtctcatttggagagtatcctctatgaagaagttcttcgacaaatcgttcatctagtcctttaattccacaatacgcatgtagaatgtgataattatttccagaaggttcgatagcttgtagcatattcctaaatacatctaaatttttactattatatttggcataaagagatagataatactcggccgacataatgttgtccattgtagtataaaaattaatatttctatttctgtatatttgcaacaatttactctctataacaaatatcataacttagttcttttatgtcaagaaggcactggtttagttcatctataaatgtcacgccataactaccacgcatgccatactcagaattatgataaagatatttatccttggggtgtaggtaatggggattaatctttgttggatcagtctctaagttaacacatgtcacacatgatccatttatagttatatcacacgatgatgatttatgaattgattccggaagatcgctatcgtattttgtggttccacaattcatttccatacatgttattgtcacactaatattatgatgaactttatctagccgctgagtggtaaacaacagaacagatagtttattatctttaccaacaccctcagccgctgccacaaatctctgatccgtatccatgatggtcatgtttatttctagtccgtatccagtcaacactatgttagcatttctgtcgatatagctttcactcatatgacactcaccaataatagtagaattaatgtcgtaatttacaccaatagtgagttcggcggcaaagtaccaataccggtaatcttgtcgaggaggacatatagtattcttgtattctaccgaatacccgagagatgcgatacaaaagagcaagactaatttgtaaaccatcttactcaaaatatgtaacaatagtacgatgcaatgagtaagacaataggaaatctatcttatatacacataattattctatcaattttaccaattagttagtgtaatgttaacaaaaatgtgggagaatctaattagtttttctttacacaattgacgtacatgagtctgagttccttgtttttgctaattatttcatccaatttattattcttgacgatatcgagatcttttgtataggagtcaaacttgtattcaacatgcttttctataatcattttagctatttcggcatcatccaatagtacattttccagattagcagaatagatattaatgtcgtatttgaacagagcctgtaacatctcaatgtctttattatctatagccaatttaatgtccggaatgaagagaagggaattattggtgtttgtcgacgtcatatagtcgagcaagagaatcatcatatccacgtgtccattttttatagtgatgtgaatacaactaaggagaatagccagatcaaaagtagatggtatctctgaaagaaagtaggaaacaatacttacatcattaagcatgacggcatgataaaatgaagttttccatccagttttcccatagaacatcagtctccaatttttcttaacaaacagttttaccgtttgcatgttaccactatcaaccgcataatacaatgcggtgtttcccttgtcatcaaattgtgaatcatccagtccactgaatagcaaaatctttactattttggtatcttccaatgtggctgcctgatgtaatggaaattcattctctagaagatttttcaatgctccagcgttcaacaacgtacatactagacgcacgttattatcagctattgcataatacaaggcactatgtccatggacatccgccttaaatgtatctttactagagagaaagcttttcagctgcttagacttccaagtattaattcgtgacagatccatgtctgaaacaagacgctaattagtgtatattttttcattttttataattttgtcatattgcaccagaattaataatatctctaatagatctgattagtagatacatggctatcgcaaaacaacatatacacatttaataaaaataatatttattaagaaaattcagatttcacgtacccatcaatataaataaaataatgattccttacaccgtacccatattaaggagattccaccttacccataaacaatataaatccagtaatatcatgtctgatgatgaacacaaatggtgtattaaattccagtttttcaggagatgatctcgccgtagctaccataatagtagatgcctctgctacagttccttgttcgtcgacatctatctttgcattctgaaacattttataaatatataatgggtccctagtcatatgtttaaacgacgcattatctggattaaacatactaggagccatcatttcggctatcgacttaatatccctcttattttcgatagaaaatttagggagtttaagattgtacactttatttcctaattgagacgaccaatagtctaattttgcagccgtgatagaatctgtgaaatgggtcatattatcacctattgccaggtacatactaatattagcatccttatacggaaggcgtaccatgtcatattctttgtcatcgattgtgattgtatttccttgcaatttagtaactacgttcatcatgggaaccgttttcgtaccgtacttattagtaaaactagcattgcgtgttttagtgatatcaaacggatattgccatatacctttaaaatatatagtattaatgattgcccatagagtattattgtcgagcatattagaatctactacattagacataccggatctacgttctactatagaattaattttattaaccgcatctcgtctaaagtttaatctatataggccgaatctatgatattgttgataatacgacggtttaatgcacacagtattatctacgaaactttgataagttagatcagtgtacgtatatttagatgttttcagcttagctaatcctgatattaattctgtaaatgctggacccagatctctttttctcaaatccatagtcttcaataattctattctagtattacctgatgcaggcaatagcgacataaacatagaaaacgaataaccaaacggtgagaagacaatattatcatcttgaatatttttatacgctactataccggcattggtaaatccttgtagacgataggcggacgctgaacacgctaacgatagtatcaataacgcaatcatgattttatggtattaataattaaccttatttttatgttcggtataaaaaaattattgatgtctacacatccttttgtaattgacatctatatatccttttgtataatcaactctaatcactttaacttttacagttttccctaccagtttatccctatattcaacatatctatccatatgcatcttaacactctctgccaagatagcttcagagtgaggatagtcaaaaagataaatatatagagcataatcattctcgtatactctgccctttattacatcacccgcattgggcaacgaataacaaaatgcaagcatcttgttaacgggctcgtaaattgggataaaaattatgtttttattgtcttatatctattttattcaagagaatattcaggaatttctttttccggttgtatctcgtcgcagtatatatcatttgtacattgtttcatattttttaatagtttacaccttttagtaggactagtatcgtacaattcatagctgtattttgaattccaatcacgcataaaaatatcttccaattgttgacgaagacctaatccatcatccggtgtaatattaatagatgctccacatgtatccgtaaagtaatttcctgtccaatttgaggtacctatataggccgttttatcggttaccatatatttggcatggtttaccctagaatacggaatgggaggatcagcatctggtacaataaatagctttacttctatatttatgtttttagattttagcatagcgatagatcttaaaaagtttctcatgataaacgaagatcgttgccagcaactaatcaatagcttaacggatacttgtctgtctatagcggatcttcttaattcatcttctatataaggccaaaacaaaattttacccgccttcgaataaataatagggataaagttcataacagatacataaacgaatttactcgcatttctaatacatgacaataaagcggttaaatcattggttctttccatagtacatagttgttgcggtgcagaagcaataaatacagagtgtggaacgccgcttacgttaatactaagaggatgatctgtattataatacgacggataaaagtttttccaattatatggtagattgttaactccaagataccagtatacctcaaaaatttgagtgagatccgctgccaagttcctattattgaagatcgcaatacccaattccttgacctgagttagtgatctccaatccatgttagcgcttcctaaataaatatgtgtattatcagatatccaaaattttgtatgaagaactcctcctaggatatttgtaatatctatgtatcgtacttcaactccggccatttgtagtctttcaacatcctttaatggtttgttagatttattgacggctactctaactcgtactcctcttttgggtaattgtacaatctcgtttaatattatcgtgccgaaattcgtacccacttcatccgataaactccaataaaaagatgatatatctagtgtttttgtggtattggatagaatttccctccacatgttaaatgtagacaaatatactttatcaaattgcatacctataggaatagtttctgtaatcactgcgattgtattatccggattcattttatttgttaaaagaataatcctatatcacttcactctattaaaaatccaagtttctatttctttcatgactgattttttaacttcatccgtttccttatgaagatgatgtttggcaccttcataaatttttatttctctattacaatttgcatgttgcatgaaataatatgcacctaaaacatcgctaatcttattgtttgttccctggagtatgagagtcgggggggtgttaatcttggaaattatttttctaaccttgttggtagccttcaagacctgactagcaaatccagccttaattttttcatgattgactaatgggtcgtattggtatttataaactttatccatatctctagatactgattctggacatagctttccgactggcgcatttggtgtgatggttcccataagtttggcagctagcagattcagtcttgaaacagcatctgcattaactagaggagacattagaatcattgctgtaaacaagtttggattatcgtaagaggctagctcccatggaatgacccaataagtagatttaatagttaccacgtgctgtaccaaagtcatcaatcatcattttttcaccattacttcttccatgtccaatatgatcatgtgagaatactaaaattcctaacgatgatatgttttcagctagttcgtcataacgtccagaatgtttaccagctccatgacttatgaatactaatgccttaggatatgtaataggtttccaatatatgtaatcattgtccagattgaacatacagtttgcactcatgattcacgttatataactatcaatattaacagttcgtttgatgatcatattatttttatgttttattgataattgtaaaaacatacaattaaatcaatatagaggaaggagacggctactgtcttttgtgagatagtcatggcgactaaattagattatgaggatgctgttttttactttgtggatgatgataaaatatgtagtcgcgactccatcatcgatctaatagatgaatatattacgtggagaaatcatgttatagtgtttaacaaagatattaccagttgtggaagactgtacaaggaattgatgaagttcgatgatgtcgctatacggtactatggtattgataaaattaatgagattgtcgaagctatgagcgaaggagaccactacatcaattttacaaaagtccatgatcaggaaagtttattcgctaccataggaatatgtgctaaaatcactgaacattggggatacaaaaagatttcagaatctagattccaatcattgggaaacattacagatctgatgaccgacgataatataaacatcttgatactttttctagaaaaaaaattgaattgatgatataggggtcttcataacgcataattattacgttagcattctatatccgtgttaaaaaaaattatcctatcatgtatttgagagttttatatgtagcaaacatgatagctgtgatgccaataagctttagatattcacgcgtgctagtgttagggatggtattatctggtggtgaaatgtccgttatataatctacaaaacaatcatcgcatatagtatgcgatagtagagtaaacatttttatagtttttactggattcatacatcgtctacccaattcggttataaatgaaattgtcgccaatcttacacccaaccccttgttatccattagcatagtattaacttcgttatttatgtcataaactgtaaatgattttgtagatgccatatcatacatgatattcatgtccctattataatcattactaactttatcacaatatatgttgataatatctatatatgatctagtctttgtgggcaactgtctatacaagtcgtctaaacgttgtttactcatatagtatcgaacagccatcattacatggtcccgttccgttgatagataatcgagtatgttagtggacttgtcaaatctatataccatattttctggaagtggatatacatagtcgtgatcaacattattgctagcctcatcttctatatcctgtactataccattatctatatcatctacataatctatgatattattacacataaacatcgacaacatactattgtttattatctaagtcctgttgatccaaacccttgatctcctctatttgtactatctagagattgtacttcttccagttctggataatatatacgttgatagattagctgagctattctatctccagtatttacattaaacgtacattttccattattaataagaatgactcctatgtttcccctataatcttcgtctattacaccgcctcctatatcaatgccttttagtgacagaccagacctaggagctattctaccatagcaaatcttaggcatggacatactaatatctgtcttaattaactgtctttctcctggagggatagtataatcgtaagcgctatacaaatcatatccggcagcacccggcgattgcctagtaggagatttagctctgttagtttccttaacaaatctaactggtgagttaatattcatgttgaacataaaactaatattttatttcaaaattatttaccatcccatatattccatgaataagtgtgatgattgtacacttctatagtatctatatacgattcacgataaaatcctcctatcaatagcagtttattatccactatgatcaattctggattatccctcggataaataggatcatctatcagagtccatgtattgctggattcacaataaaattccgcatttctaccaaccaagaataaccttctaccgaacactaacgcgcatgatttataatgaggataataagtggatggtccaaactgccactgatcatgattgggtagcaaatattctgtagttgtatcagtttcagaatgtcctcccattacgtatataacattgtttatagatgccactgctggattacatctaggtttcagaagactcggcatattaacccaagcagcatccccgtggaaccaacgctcaacagatgtgggatttggtagacctcctactacgtataatttattgttagcgggtatcccgctagcatacagtctggggctattcatcggaggaattggaatccaattgtttgatatataatttaccgctatagcattgttatgtatttcattgttcatccatccaccgatgagatatactacttctccaacatgagtacttgtacacatatggaatatatctataatttgatccatgttcataggatactctatgaatggatacttgtatgatttgcgtggttgtttatcacaatgaaatattttggtacagtctagtatccattttacattatttatacctctgggagaaagataatttgacctgattacatttttgataaggagtagcagatttcctaatttatttcttcgctttatataccacttaatgacaaaatcaactacataatcctcatctggaacatttagttcatcgctttctagaataagttttatagatagataatcaaaattgtctatgatgtcatcttctagttccaaaaagtgtttggcaataaagtttttagtatgacataagagattggatagtccgtattctatacccatcatgtaacactcgacacaatattcctttctaaaatctcgtaagataaagtttatacaagtgtagatgataaattctacagaggttaatatagaagcacgtaataaattgacgacgttatgactatctatatatacctttccagtatatgagtaaataactatagaagttagactgtgaatgtcaaggtctagacaaacccttgtaactggatctttatttttcgtgtatttttgacgtaaatgtgtgcgaaagtaaggagataactttttcaatatcgtagaattgactattatattgccacctatagcatcaataattgttttgaatttcttagtcatagacaatgctaatatattcttacagtacacagtattgacaaatatcggcatttatgtttctttaaaagtcaacatctagagaaaaatgattatctttttgagacataactcccattttttggtattcacccacacgtttttcgaaaaaattagtttttccttccaatgatatattttccatgaaatcaaacggattggtaacattataaatttttttaaatcccaattcagaaatcaatctatccgcgacgaattctatatatgttttcatcatttcacaattcattcctataagtttaactggaagagccgcagtaagaaattcttgttcaatggataccgcatctgttataatagatctaacggtttcttcactcggtggatacaataaatgtttaaacatcaaacatgcgaaatcgcagtgcagaccctcgtctctactaattagttcgttggaaaacgtgagtccgggcattaggccacgctttttaagccaaaatatggaagcgaatgatccggaaaagaagattccttctactgcagcaaaggcaataagtctctctccataaccggcgctgtcatgtatccacttttgagcccaatcggccttcttttttacacaaggcatcgtttctatggcattaaagagatagtttttttcattactatctttaacataagtatcgatcaaaagactatacatttccgaatgaatgttttcaatggccatctgaaatccgtagaaacatctagcctcggtaatctgtacttctgtacaaaatcgttccgccaaattttcattcactattccgtcactggctgcaaaaaacgccaatacatgttttataaaatatttttcgtctggtgttagtttattccaatcattgatatctttagatatatctacttcttccactgtccaaaatgatgcctctgcctttttatacatgttccagatgtcatgatattggattgggaaaataacaaatctatttggatttggtgcaaggatgggttccataactaaattaacaataacaataaattttttttcagttatctatatgcctgtacttggattttttgtacatcgatatcgccgcaatcactacaataattacaagtattattgatagcattgttattagtactatcataattaaattatctacattcatgggtgctgaataatcgttattatcatcattatcattttgtaattgtgacatcatactagataaatcgtttgcgagattgttgtgggaagcgggcatggaggatgcattatcattattatttaacgccttccatttggattcacaaatgttacgcacattcaacattttatggaaactataattttgtgaaaacaaataacaagaaaactcgtcatcgttcaaatttttaacgatagtaaaccgattaaacgtcgagctaatttctaacgctagcgactctgttggatatgggtttccagatatatatcttttcagttcccctacgtatctataatcatctgtaggaaatggaagatatttccatttatctactgttcctaatatcatatgtggtggtgtagtagaaccattaagcgcgaaagatgttatttcgcatcgtattttaacttcgcaataatttctggttagataacgcactctaccagtcaagtcaatgatattagcctttacagatatattcatagtagtcgtaacgatgactccatcttttagatgcgatactcctttgtatgtaccagaatcttcgtacctcaaactcgatatatttaaacaagttaatgagatattaacgcgttttatgaatgatgatatataaccagaagttttatcctcggtggctagcgctataaccttatcattataataccaactagtgtgattaatatgtgacacgtcagtgtgggtacaaatatgtacattatcgtctacgtcgtattcgatacatccgcatacagccaacaaatataaaatgacaaatactctaacgccgttcgtacccatcttgatgcggtttaataaatgttttgatttcaatttattgtaaaaaaagattcggttttatactgttcgatattctcattgcttatattttcatctatcatctccacacagtcaaatccgtggttagcatgcacctcatcaaccggtaaaagactatcggactcttctatcattataactctagaatatttaatttggtcattattaatcaagtcaattatcttatttttaacaaacgtgagtattttactcattttttataaaaacttttagaaatatacagactctatcgtgtgtctatatcttctttttatatccaatgtatttatgtctgatttttcttcatttatcatatataatggtccaaattctacacgtgcttcggattcatccagatcattaaggttcttataattgtaacatccttctcttccctcttctacatcttccttcttattcttattcttagcgtcacagaatctaccacagcaggatcccatgacgagcgtcatattaaactaatccattttcaattataatatatgattagtaatgaccattaaaataaaaaatattcttcataaccggcaagaaagtgaaaagttcacattgaaactatgtcagtagtatacatcatgaaatgatgatatatatatactctattttggtggaggattatatgatataattcgtggataatcatttttaagacacatttctttattcgtaaatcttttcacgttaaatgagtgtccatattttgcaatttcttcatatgatggcggtgtacgtggacgaggctgctcctgttcttgttgtggtcgccgactgtcgtgtctgcgtttagatccctccattatcgcgattgcgtagatggagtactattttataccttgtaattaaatttttttattaattaaacgtataaaaacgttccgtatctgtatttaagagccagatttcgtctaatagaacaaatagctacagtaaaaataactagaataattgctacacccactagaaaccacggatcgtaatacggcaatcggttttcgataataggtggaacgtatattttatttaaggacttaacaattgtctgtaaaccacaatttgcttccgcggatcctgtattaactatctgtaaaagcatatgttgaccgggcggagccgaacattctccgatatctaatttctgtatatctataatattattaacctccgcatacgcattacagttcttttctagcttggataccgcactaggtacatcgtctagatctattcctatttcctcagcgatagctcttctatccttttccggaagcaatgaaatcacttcaataaatgattcaaccatgagtgtgaaactaagtcgagaattactcatgcatttgttagttattcggagcgcgcaatttttaaactgtcctataacctctcctatatgaatagcacaagtgacattagtagggatagaatgttgagctaatttttgtaaataactatctataaaaagattatacaaagttttaaactctttagtttccgccatttatccagtctgagaaaatgtctctcataataaatttttccaagaaactaattgggtgaagaatggaaacctttaatctatatttatcacagtctgttttggtacacatgatgaattcttccaatgccgtactaaattcgatatctttttcgatttctggatatgtttttaataaagtatgaacaaagaaatggaaatcgtaataccagttatgtttaactttgaaattgttttttattttcttgttaatgattccagccacttgggaaaagtcaaagtcgtttaatgccgatttaatacgttcattaaaaacaaactttttatcctttagatgaattattattggttcattggaatcaaaaagtaagatattatcgggtttaagatctgcgtgtaaaaagttgtcgcaacagggtagttcgtagattttaatgtataacagagccatctgtaaaaagataaactttatgtattgtaccaaagatttaaatcctaatttgatagctaactcggtatctactttatctgccgaatacagtgctaggggaaaaattataatgtttcctctttcatattcgtagttagttctcttttcatgttcgaaaaagtgaaacatgcggttaaaatagtttataacattaatattactgttaataactgccggataaaagtgggatagtaatttcacgaatttgatactgtcctttctctcgttaaacgcctttaaaaaaactttagaagaatatctcaatgagagttcctgaccatccatagtttgtatcaataatagcaacatatgaagaacccgtttatacagagtatgtaaaaatgttaatttatagtttaatcccatggcccacgcacacacgattaattttttttcatctccctttagattgttgtatagaaatttgggtactgtgaactccgccgtagtttccatgggactatataattttgtggcctcgaatacaaattttactacatagttatctatcttaaagactataccatatcctcctgtagatatgtgataaaaatcgtcgtttataggataaaatcgtttatccttttgttggaaaaaggatgaattaatgtaatcattctcttctatctttagtagtgtttccttattaaaattcttaaaataatttaacaatctaactgacggagcccaattttggtgtaaatctaattgggacattatattgttaaaatacaaacagtctcctaatataacagtatctgataatctatggggagacatccattgatattcaggggatgaatcattggcaacacccatttattgtacaaaaagccccaatttacaaacgaaagtccaggtttgatagagacaaactattaactattttgtctctgtttttaacacctccacagtttttaatttctttagtaatgaaattattcacaatatcagtatcttctttatctaccagagattttactaacttgataaccttggctgtctcattcaatagggtagtaatatttgtatgtgtgatattgatatctttttgaattgtttcttttagaagtgattctttgatggtgccagcatacgaattacaataatgcagaaactcggttaacatgcaggaattatagtaagccaattccaattgttgcctgtgttgtattagagtgtcaatatgagcaatggtgtccttgcgtttctctgatagaatgcgagcagcgattttggcgttatcatttgacgatatttctggaatgacgaatcctgtttctactaactttttggtaggacaaagtgaaacaatcaagaagatagcttctcctcctatttgtggaagaaattgaactcctctagatgatctactgacgatagtatctccttgacagatattggaccgaattacagaagtacctggaatgtaaagccctgaaaccccctcattttttaagcagattgttgccgtaaatcctgcactatgcccaagatagagagctcctttggtgaatccatctctatgtttcagtttaaccaagaaacagtcagctggtctaaaatttccatctctatctaatacagcatctaacttgatgtcaggaactatgaccggtttaatgttatatgtaacattgagtaaatccttaagttcataatcatcactgtcatcagttatgtacgatccaaacaatgtttctaccggcatagtggatacgaagatgctatccatcagaatgtttccctgattagtattttctatatagctattcttctttaaacgattttccaaatcagtaactatgttcatttttttaggagtaggacgcctagccagtatggaagaggattttctagatcctctcttcaacatctttgatctcgatggaatgcaaaaccccatagtgaaacaaccaacgataaaaataatattgtttttcactttttataattttaccatctgactcatggattcattaatatctttataagagctactaacgtataattctttataactgaactgagatatatacaccggatctatggtttccataattgagtaaatgaatgctcggcaataactaatggcaaatgtatagaacaacgaaattatactagagttgttaaagttaatattttctatgagctgttccaataaattatttgttgtgactgcgttcaagtcataaatcatcttgatactatccagtaaaccgtttttaagttctggaatattatcatcccattgtaaagcccctaattcgactatcgaatatcctgctctgatagcagtttcaatatcgacggacgtcaatactgtaataaaggtggtagtattgtcatcatcgtgataaactacgggaatatggtcgttagtaggtacggtaactttacacaacgcgatatataactttccttttgtaccatttttaacgtagttgggacgtcctgcagggtattgttttgaagaaatgatatcgagaacagatttgatacgatatttgttggattcctgattattcactataatataatctagacagatagatgattcgataaatagagaaggtatatcgttggtaggataatacatccccattccagtattctcggatactctattgatgacactagttaagaacatgtcttctattctagaaaacgaaaacatcctacatggactcattaaaacttctaacgctcctgattgtgtctcgaatgcctcgtacaaggatttcaaggatgccatagattctttgaccaacgatttagaattgcgtttagcatctgatttttttattaaatcgaatggtcggctctctggtttgctaccccaatgataacaatagtcttgtaaagataaaccgcaagaaaatttatacgcatccatccaaataaccctagcaccatcggatgatattaatgtattattatagattttccatccacaattattgggccagtatactgttagcaacggtatatcgaatagattactcatgtaacctactagaatgatagttcgtgtactagtcataatatctttaatccaatctaaaaaatttaaaattagattttttacactgttaaagttaacaaaagtattacccgggtacgtggatatcatatatggcattggtccattatcagtaatagctccataaactgatacggcgatggtttttatatgtgtttgatctaacgaggaagaaattcgcgcccacaattcatctctagatatgtatttaatatcaaacggtaacacatcaatttcgggacgcgtatatgtttctaaatttttaatccaaatataatgatgacctatatgccctattatcatactgtcaactatagtacacctagggaacttacgatacatctgtttcctataatcgttaaattttacaaatctataacatgctaaaccttttgacgacagccattcattaatttctgatatggaatctgtattctcgataccgtatcgttctaaagccagtgctatatctccctgttcgtgggaacgctttcgtataatatcgatcaacggataatctgaagtttttggagaataatatgactcatgatctatttcgtccataaacaatctagacataggaattggaggcgatgatcttaattttgtgcaatgagtcgtcaatcctataacttctaatcttgtaatattcatcatcgacataatactatctatgttatcatcgtatattagtataccatgaccttcttcatttcgtgccaaaatgatatacagtcttaaatagttacgcaatatctcaatagtttcataattgttagctgttttcatcaaggtttgtatcctgtttaacatgatggcgttctataacgtctctattttctatttttaattttttaaatttttaacgatttactgtggctagatacccaatctctctcaaatatttttttagcctcgcttacaagctgtttatctatactattaaaactgacgaatccgtgattttggtaatgggttccgtcgaaatttgccgaagtgatatgaacatattcgtcgtcgactatcaacaattttgtattattctgaatagtgaaaaccttcacagatagatcattttgaacacacaacgcatctagacttttggcggttgccatagaatatacgtcgttcttatcccaattaccaactagaagtctgatcttaactcctctattaatggctgcttctataatggagttgtaaatgtcgggccaatagtagctattaccgtcgacacgtgtagtgggaactatggccaaatgttcaatatctatactagtcttagctgacctgagtttatcaataactacatcggtatctagatctctagaatatcccaataggtgttccggagaatcagtaaagaacactccacctataggattcttaatatgatacgcagtgctaactggcaaacaacaagccgcagagcataaattcaaccatgaattttttgcgctattaaaggctttaaaagtatcaaatcttctacgaagatctgtggccagcgggggataatcagaatatacacctaacgttttaatcgtatgtatagatcctccagtaaatgacgcgtttcctacataacatctttcatcatctgacacccaaaaacaaccgagtagtagtcccacattattttttttatctatattaacggttataaaatttatatccgggcagtgactttgtagctctcccagatttcttttccctcgttcatctagcaaaactattattttaatccctttttcagatgcctcttttagtttatcaaaaataagcgctcccctagtcgtactcagaggattacaacaaaaagatgctatgtatatatatttcttagctagagtgataatttcgttaaaacattcaaatgttgttaaatgatcggatctaaaatccatattttctggtagtgtttctaccagcctacattttgctcccgcaggtaccgatgcaaatggccacatttagttaacataaaaacttatacatcctgttctatcaacgattctagaatatcatcggctatatcgctaaaattttcatcaaagtcgacatcacaacctaactcagtcaatatattaagaagttccatgatgtcatcttcgtctatttctatatccgtatccattgtagattgttgaccgattatcgagtttaaatcattactaatactcaatccttcagaatacaatctgtgtttcattgtaaatttataggcggtgtatttaagttggtagattttcaattatgtattaatatagcaacagtagttcttgctcctccttgattctagcatcctcttcattattttcttctacgtacataaacatgtccaatacgttagacaacacaccgacgatggcggccgctacagacacgaatatgactaaaccgatgaccatttaaaaacccctctctagctttcacttaaactgtatcgatcattcttttagcacatgtataatataaaaacattattctatttcgaatttaggcttccaaaaatttttcatccgtaaaccgataataatatatatagacttgttaatagtcggaataaatagattaatgcttaaactatcatcatctccacgattagagatacaatatttacattctttttgctgtttcgaaactttatcaatacacgttaatacaaacccaggaaggagatattgaaactgaggctgttgaaaatgaaacggtgaatacaataattcagataatgtaaaatcatgattccgtattctgatgatattagaactgctaatggatgtcgatggtatgtatctaggagtatctattttaacaaagcatcgatttgctaatatacaattatccttttgattaattgttattttattcatattcttaaaaggtttcatatttatcaattcttctacattaaaaatttccatttttaatttatgtagccccgcaatactcctcattacgtttcattttttgtctataatatccattttgttcatctcggtacatagattatccaattgagaagcgcatttagtagttttgtacattttaagtttattgacgaatcgtcgaaaactagttatagttaacattttattatttgataccctgatattaatacccctgccgttactattatttataactgatgtaatccacgtaacattggaattaactatcgatagtaatgcatcgacgcttccaaaattgtctattataaactcaccgataatttttttattgcatgttttcatattcattaggattatcaaatctttaatcttattacgattgtatgcgttgatattacaagacgtcattctaaaagacggaggatctccatcaaatgccagacaatcacgtacaaagtacatggaaataggttttgttctattgcgcatcatagatttatatagaacacccgtagaaatactaatttgttttactctataaaatactaatgcatctatttcatcgttttgtataacgtctttccaagtgtcaaattccaaatttttttcattgatagtaccaaattcttctatctctttaactacttgcatagataggtaattacagtgatgcctacatgccgttttttgaaactgaatagatgcgtctagaagcgatgctacgctagtcacaatcaccactttcatatttagaatatatatatgtaaaaatatagtagaatttcattttgtttttttctatgctataaatgaattctcattttgcatctgctcatactccgttttatatcaataccaaagaaggaagatatctggttctaaaagccgttaaagtatgcgatgttagaactgtagaatgcgaaggaagtaaagcttcctgcgtactcaaagtagataaaccctcatcgcccgcgtgtgagagaagaccttcgtccccgtccagatgcgagagaatgaataaccctggaaaacaagttccgtttatgaggacggacatgctacaaaatatgttcgcggctaatcgcgataatgtagcttctagacttttgtcctaaaatactattatatccttttcgatattaataaatccgtgtcgtccaggttttttatctctttcagtatgtgaatagataggtattttatctctattcatcatcgaatttaagagatccgataaacattgtttgtattctccagatgtcagcatctgatacaacaatatatgtgcacataaacctctggcacttatttcatgtaccttccccttatcactaaggagaatagtatttgagaaatatgtatacatgatattatcatgaattagatatacagaatttgtaacactctcgaaatcacacgatgtgtcggcgttaagatctaatatatcactcgataacacattttcatctagatacactagacattttttaaagctaaaatagtctttagtagtaacagtaactatgcgattattttcatcgatgatacatttcatcggcatattattacgcttaccatcaaagactataccatgtgtatatctaacgtattctagcatggttgccatacgcgcattaaacttttcaggatctttggatagatcttccaatctatctatttgagaaaacatttttatcatgttcaatagttgaaacgtcggatccactatatagatattatctataaagattttaggaactacgttcatggtatcctggcgaatattaaaactatcaatgatatgattatcgttttcatcttttatcaccatatagtttctaagatatgggattttacttaatataatattatttcccgtgataaattttattagaaaggccaaatctataagaaaagtcctagaattagtctgaagaatatctatatcgccgtatagtatatttggattaattagatatagagaatatgatccgtaacatatacaacttttattatggcgtctaagatattcttccatcaacttattaacatttttgactagggaagatacattatgacgtcccattacttttgccttgtctattactgcgacgttcatagaatttagcatatctcttgccaattcttccattgatgttacattataagaaattttagatgaaattacatttggagctttaatagtaagaactcctaatatgtccgtgtatgtggtcactaatacagattgtagttctataatcgtaaataatttacctatattatatgtttgagtctgtttagaaaagtagctaagtatacgatcttttatttctgatgcagatgtattaacatcggaaaaaaatctttttttattcttttttactaaagatacaaatatgtctttgttaaaaacagttattttctgaatatttctagcttgtaattttaacatatgatattcgttcacactaggtactctgcctaaataggtttctataatctttaatgtaatattaggaaaagtattctgatcaggattcctattcattttgaggatttaaaactctgattattgtctaatatggtctctacgcaaactttttcacagagcgatagagtttttgataactcgtttttcttaagaaatataaaactactgtttccagagctcgctctatcttttattttatctaattcgatacaaactcctgatactggttcagaaagtaattcattaattttcagtcctttatagaagatatttaatatagataatacaaaatcttcagtttttgatatcgatctgattgatcctagaactagatatattaataacgtgctcattaggcagtttatggcagcttgataattagatatagtatattccagttcatatttattagataccgcattgcccagattttgatattctatgaattcctctgaaaataaatccaaaataactagacattctattttttgtggattagtgtactctcttccctctatcatgttcactactggtgtccacgatgataaatatctagagggaatataatatagtccataggatgccaatctagcaatgtcgaataactgtaatttgattcttcgttcttcattatgaattgattcttgaggtataaacctaacacaaattatattattagacttttcgtatgtaatgtctttcatgttataagtttttaatcctggaatagaatctattttaatgaggcttttaaacgcagagttctccaacgagtcaaaacataatactctgttgtttttcttatatacgatgttacgattttcttctttgaatggaataggtttttgaattagtttataattacaacataatagataaggaagtgtgcaaatagtacgcggaaaaaacataatagctcccctgttttcatccatggttttaagtaaatgatcactggcttctttagtcaatggatattcgaacattaaccgtttcatcatcattggacagaatccatatttcttaatgtaaagagtgatcaaatcattgtgtttattgtaccatcttgttgtaaatgtgtattcggttatcggatctgctcctttttctattaaagtatcgatgtcaatctcgtctaagaattcaactatatcgacatatttcatttgtatacacataaccattactaacgtagaatgtataggaagagatgtaacgggaacagggtttgttgattcgcaaactattctaatacataattcttctgttaatacgtcttgcacgtaatctattatagatgccaagatatctatataattattttgtaagatgatgttaactatgtgatctatataagtagtgtaataattcatgtattttgatatatgttccaactctgtctttgtgatgtctagtttcgtaatatctatagcatcctcaaaaaatatattcgcatatattcccaagtcttcagttctatcttctaaaaaatcttcaacgtatggaatataataatctattttacctcttctgatatcattaatgatatagtttttgacactatcttctgtcaattgattcttattcactatatctaagaaacggatagcgtccctaggacgaactactgccattaatatctctattatagcttctggacataattcatctattataccagaattaatgggaactattccgtatctatctaacatagttttaagaaagtcagaatctaagacttgatgttcatatattggttcatacatgaaatgatctctattgatgatagtgactatttcattctctgaaaattggtaactcattctatatatgctttccttgttgatgaaggatagaatatactcaatagaatttgtaccaacaaactgttctcttatgaatcgtatatcatcatctgaaataatcatgtaaggcatacatttaacaattagagacttgtctcctgttatcaatatactattcttgtgataatttatgtgtgaggcaaatttgtccacgttctttaattttgttatagtagatatcaaatccaatggagctacagttcttggcttaaacagatatagtttttctggaacaaattctacaacattattataaaggactttgggtaaataagtgggatgaaatcctattttaattaatgcgatagccttgtcctcgtgcagatatccaaacgcttttgtgatagtatggcattcattgtctagaaacgctctacgaatatctgtgacagatatcatctttagagaatatactagtcgcgttaatagtactacaatttgtattttttaatctatctcaataaaaaaattaatatgtatgattcaatgtataactaaactactaactgttattgataactagaatcagaatctaatgatgacgtacccaagaagtttatctactgccaatttagctgcattatttttagcatctcgtttagattttccatctgccttatcgaatactcttccgtcgatatctacacaggcataaaatgtaggagagttactaggcccaactgattcaatacgaaaagaccaatctctcttagttatttggcagtactcattaataacggtgacagggttagcatctttccaatcaataatttttttagccggaataacatcatcaaaagacttatgatcctctctcattgatttttcgcgggatacatcatctattatgacgtcagccataacatcagcatccggcttatccgcctccgttgtcataaaccaacgaggaggaatatcgtcggagctgtacaccatagcactacgttgaagatcgtacagagctttattaacttctcgcttctccatattaagttgtctagttagttgtgcagcagtagctccttcgattccaatggttttaatagcctcacacacaatctctgcgttagaacgttcgtcgatatagattttagacatttttagagagaactaacacaaccagcaataaaactgaacctactttatcatttttttattcatcatcctctggtggttcgtcgttcctatcaaatgtagctctgattaacccgtcatctataggtgatgctggttctggagattctggaggagatggattattatctggaagaatctctgttatttccttgttttcatgtatcgattgcgttgtaacattaagattgcgaaatgctctaaatttgggaggcttaaagtgttgtttgcaatctctacacgcgtgtctaactagtggaggttcgtcagctgctctagtttgaatcatcatcggcgtagtattcctacttttacagttaggacacggtgtattgtatttctcgtcgagaacgttaaaataatcgttgtaactcacatcctttattttatctatattgtattctactcctttcttaatgcattttataccgaataagagatagcgaaggaattctttttcggtgccgctagtacccttaatcatatcacatagtgttttatattccaaatttgtggcaatagacggtttatttctatacgatagtttgtttctggaatcctttgagtattctataccaatattattctttgattcgaatttagtttcttcgatattagattttgtattacctatattcttgatgtagtactttgatgatttttccatggcccattctattaagtcttccaagttggcatcatccacatattgtgatagtaattctcggatatcagtagcggctaccgccattgatgtttgttcattggatgagtaactactaatgtatacattttccatttataacacttatgtattaactttgttcatttatattttttcattattatgttgatattaacaaaagtgaatatatatatgttaataattgtattgtggttatacggctacaattttataatgagtgaaagtcagtgtccgatgatcaatgacgatagctttactctgaaaagaaagtatcaaatcgatagtgcggagtcaacaataaaaatggataagaagaggataaagtttcagaatagagccaaaatggtaaaagaaataaatcagacaataagagcagcacaaactcattacgagacattgaaactaggatacataaaatttaagagaatgattaggactactactctagaagatatagcaccatctattccaaataatcagaaaacttataaactattctcggacatttcagccatcggcaaagcatcacagaatccgagtaagatggtatatgctctgctgctttacatgtttcccaatttgtttggagatgatcatagattcattcgttatagaatgcatccaatgagtaaaatcaaacacaagatcttctctcctttcaaacttaatcttattagaatattagtggaagaaagattctataataatgaatgcagatctaataaatggaaaataattggaacacaagttgataaaatgttgatagctgaatctgataaatatacaatagatgcaaggtataacctaaaacccatgtatagaatcaagggagaatctgaagaagataccctcttcatcaaacagatggtagaacaatgtgtgacatcccaggaattggtggaaaaagtgttgaagatactgtttagagatttgttcaagagtggagaatacaaagcgtacagatacgatgatgatgtagaaaatggattcattggattggatacactaaaattaaacattgttcatgatatagttgaaccatgtatgcctgttcgtaggccagtggctaagatactgtgtaaagaaatggtaaataaatactttgagaatccgctacatattattggtaaaaatcttcaagagtgcattgactttgttagtgaataggcatttcatctttctccaatactaattcaaattgttaaattaataatggatagtataaatagttattagttataagatagtaaaaataattattagaataagagtgtagtatcatagataactctcttctataaaaatggattttattcgtagaaagtatcttatatacacagtagaaaataatatagattttttaaaggatgatacattaagtaaagtaaacaattttaccctcaatcatgtactagctctcaagtatctagttagcaattttcctcaacatgttattactaaggatgtattagctaataccaatttttttgttttcatacatatggtacgatgttgtaaagtgtacgaagcggttttacgacacgcatttgatgcacccacgttgtacgttaaagcattgactaagaattatttatcgtttagtaacgcaatacaatcgtacaaggaaaccgtgcataaactaacacaagatgaaaaatttttagaggttgccgaatacatggacgaattaggagaacttataggcgtaaattatgacttagttcttaatccattatttcacggaggggaacccatcaaagatatggaaatcatttttttaaaactgtttaagaaaacagacttcaaagttgttaaaaaattaagtgttataagattacttatttgggcatacctaagcaagaaagatacaggcatagagtttgcggataatgatagacaagatatatatactctatttcaacaaactggtagaatcgtccatagcaatctaacagaaacgtttagagattatatctttcccggagataagactagctattgggtgtggttaaacgaaagtatagctaatgatgcggatatcgttcttaatagacccgccattaccatgtatgataaaattcttagttatatatactctgagataaaacaaggacgcgttaataaaaacatgcttaagttagtttatatctttgagcctgaaaaagatatcagagaacttctgctagaaatcatatatgatattcctggagatatcctatctattattgatgcaaaaaacgacgattggaaaaaatattttattagtttttataaagctaattttattaacggtaatacatttattagtgatagaacgtttaacgaggacttattcagagttgttgttcaaatagatcccgaatatttcgataatgaacgaattatgtctttattctctacgagtgctgcggacattaaacgatttgatgagttagatattaataacagttatatatctaatataatttatgaggtgaacgatatcacattagatacaatggatgatatgaagaagtgtcaaatctttaacgaggatacgtcgtattatgttaaggaatacaatacatacctgtttttgcacgagtcggatcccatggtcatagagaacggaatactaaagaaactgtcatctataaaatccaagagtagacggctgaacttgtttagcaaaaacattttaaaatattatttagacggacaattggctcgtctaggtcttgtgttagatgattataaaggagacttgttagttaaaatgataaaccatcttaagtctgtggaggatgtatccgcattcgttcgattttctacagataaaaaccctagtattcttccatcgctaatcaaaactattttagctagttataatatttccatcatcgtcttatttcaaaggtttttgagagataatctatatcatgtagaagaattcttggataaaagcatccatctaaccaagacggataagaaatatatacttcaattgataagacacggtagatcatagaacagaccaaatatattattaataatttgtatatacatagatataattatcacacatttttgataaatgggaactgctgcaacaattcagactcccaccaaattaatgaataaagaaaatgcagaaatgattttggaaaaaattgttgatcatatagttatgtatattagtgacgaatcaagtgattcagaaaataatcctgaatatattgattttcgtaacagatacgaagactatagatctctcattataaaaagtgatcacgagtttgtaaagctatgtaaaaatcatgcggagaaaagttctccagaaacgcaacaaatgattatcaaacacatatacgaacaatatcttattccagtatctgaagtactattaaaacctataatgtccatgggtgacataattacatataacggatgtaaagacaatgaatggatgctagaacaactctctaccctaaactttaacaatctccgcacatggaactcatgtagcataggcaatgtaacgcgtctgttttatacattttttagttatctgatgaaagataaactaaatatataagtataatcccattctaatactttaacctgatgtattagcatcttattagaatattaacctaactaaaagacataacataaaaactcattacatagttgataaaaagcggtaggatataaatattatggctgccaccgttccgcgttttgacgacgtgtacaaaaatgcacaaagaagaattctagatcaagaaacattttttagtagaggtctaagtagaccgttaatgaaaaacacatatctatttgataattacgcgtatggatggataccagaaactgcaatttggagtagtagatacgcaaacttagatgcaagtgactattatcccatttcgttgggattacttaaaaagttcgagtttctcatgtctctatataaaggtcctattccagtatacgaagaaaaagtaaatactgaattcattgctaatggatctttctccggtagatacgtatcatatcttagaaagttttctgctcttccaacaaacgagtttattagttttttgttactgacttccattccaatctataatatcttgttctggtttaaaaatactcagtttgatattactaaacacacattattcagatacgtctatacagataatgccaaacacctggcgttggctaggtatatgtatcaaacaggagactataagcctttgtttagtcgtctcaaagagaattatatatttaccggtcccgttccaatatgtatcaaagatatagatcaccctaatcttagtagagcaagaagtccatccgattatgagacattagctaatattagtactatattgtactttaccaagtatgatccggtattaatgtttttattgttttacgtacctgggtattcaattactacaaaaattactccagccgtagaatatctaatggataaactgaatctaacaaagagcgacgtacaactgttgtaaattattttatgcttcgtaaaatgtaggttttgaaccaaacattctttcaaagaatgagatgcataaaactttattatccaatagattgactatttcggacgtcaatcgtttaaagtaaacttcgtaaaatattctttgatcactgccgagtttaaaacttctatcgataattgtttcatatgttttaatatttacaagttttttggtccatggtccattaggacaaatatatgcaaaataatatcgttctccaagttctatagtctctggattatttttattatattcagtaaccaaatacatattagggttatctgcggatttataatttgagtgatgcattcgactcaacataaataattctagaggagacgatctactatcaaattcggatcgtaaatctgtttctaaagaacggagaatatctatacatacctgattagaattcatccgtccttcagacaacatctcagacagtctggttttgtacatcttaatcatattcttatgaaacttggaaacatctcttctagtttcactagtacctttattaattctctcaggtacagattttgaattcgacgatgctgagtatttcatcgttgtatatttcttcttcgattgcataatcagattcttatataccgcctcaaactctattttaaaattattaaacaatactctattattaatcagtcgttctaactctttcgctatttctatagacttatctacatcttgactgtctatctctgtaaacacggagtcggtatctccatacacgctacgaaaacgaaatctgtaatctataggcaacgatgttttcacaatcggattaatatctctatcgtccatataaaatggattacttaatggattggcaaaccgtaacataccgttagataactctgctccatttagtaccgattctagatacaagatcattctacgtcctatggatgtgcaactcttagccgaagcgtatgagtatagagcactatttctaaatcccatcagaccatatactgagttggctactatcttgtacgtatattgcatggaatcatagatggccttttcagttgaactggtagcctgttttagcatctttttatatctggctctctctgccaaaaatgttcttaatagtctaggaatggttccttctatcgatctatcgaaaattgctatttcagagatgaggttcggtagtctaggttcacaatgaaccgtaatatatctaggaggtggatatttctgaagcaatagctgattatttatttcttcttccaatctattggtactaacaacgacaccgactaatgtttccggagatagatttccaaagatacacacattaggatacagactgttataatcaaagattaatacattattactaaacattttttgttttggagcaaataccttaccgccttcataaggaaacttttgttttgtttctgatctaactaagatagttttagtttccaacaatagctttaacagtggacccttgatgactgtactcgctctatattcgaataccatggattgaggaagcacatatgttgacgcacccgcgtctgtttttgtttctactccataatactcccacaaatactgacacaaacaagcatcatgaatacagtatctagccatatctaaagctatgtttagattataatccttatacatctgagctaaatcaacgtcatcctttccgaaagataatttatatgtatcattaggtaaagtaggacataatagtacgactttaaatccattttcccaaatatctttacgaattactttacatataatatcctcatcaacagtcacataattacctgtggttaaaacctttgcaaatgcagcggctttgcctttcgcgtctgtagtatcgtcaccgatgaacgtcatttctctaactcctctatttaatactttacccatgcaactgaacgcgttcttggatatagaatccaatttgtacgaatccaatttttcaaatttttgaatgaatgaatatagatcgaaaaatatagttccattattgttattaacgtgaaacgtagtattggccatgccgcctactcccttatgactagactgatttctctcataaatacagagatgtacagcttcctttttgtccggagatctaaagataattttctctcctgttaataactctagacgattagtaatatatctcagatcaaagttatgtccgttaaaggtaacgacgtagtcgaacgttagttccaacaattgtttagctattcgtaacaaaactatttcagaacatagaactagttctcgttcgtaatccatttccattagtgactgtatcctcaaacatcctctatcgacggcttcttgtatttcctgttccgttaacatctcttcattaatgagcgtaaacaataatcgtttaccacttaaatcgatataacagtaacttgtatgcgagattgggttaataaatacagaaggaaacttcttatcgaagtgacactctatatctagaaataagtacgatcttgggatatcgaatctaggtatttttttagcgaaacagttacgtggatcgtcacaatgataacatccattgttaatctttgtcaaatattgctcgtccaacgagtaacatccgtctggagatatcccgttagaaatataaaaccaactaatattgagaaattcatccatggtggcattttgtatgctgcgtttctttggctcttctatcaaccacatatctgcgacggagcattttctatctttaatatctagattataacttattgtctcgtcaatgtctatagttctcatctttcccaacggcctcgcattaaatggaggaggagacaatgactgatatatttcgtccgtcactacgtaataaaagtaatgaggaaatcgtataaatacggtctcaccatttcgacatctggatttcagatataaaaatctgttttcaccgtgactttcaaaccaattaatgcaccgaacatccatttatagaatttagaaatatattttcatttaaatgaatcccaaacattggggaagagccgtatggaccattatttttatagtactttcgcaagcgggtttagacggcaacatagaagcgtgtaaacgaaaactatatactatagttagcactcttccatgtcctgcatgtagacggcacgcgactatcgctatagaggacaataatgtcatgtctagcgatgatctgaattatatttattattttttcatcagattatttaacaatttggcatctgatcccaaatacgcgatcgatgtgacaaaggttaaccctttataaacttaacccattataaaacttatgattagtcacaactgaaataaccgcgtgattattttttggtataattctacacggcatggtttctgtgactatgaattcaacccccgttacattagtgaaatctttaacaaacagcaagggttcgtcaaagacataaaactcattgtttacaatcgaaatagaccccctatcacacttaaaataaaaaatatccttatcctttaccaccaaataaaattctgattggtcaatgtgaatgtattcacttaacagttccacaaatttatttattaactccgaggcacatacatcgtcggtattttttatggcaaactttactcttccagcatccgtttctaaaaaaatattaacgagttccatttatatcatccaatattattgaaatgacgttgatggacagatgatacaaataagaaggtacggtacctttgtccaccatctcctccaattcatgctctattttgtcattaactttaatgtatgaaaacagtacgccacatgcttccatgacagtgtgtaacactttggatacaaaatgtttgacattagtataattgttcaagactgtcaatctataatagatagtagctataatatattctatgatggtattgaagaagatgacaaccttggcatattgatcatttaacacagacatggtatcaacagatagcttgaatgaaagagaatcagtaattggaataagcgtcttctcgatagagtgtccgtataccaacatgtctgatattttgatgtattccattaaattatttagttttttctttttattctcgttaaacagcatttctgtcaacggaccccaacatcgttgaccgattaagttttgattgatttttccgtgtaaggcgtatctagtcagatcgtatagcctatccaataatccatcatctgtgcgtagatcacatcgtacactttttaattctctatagaagagcgacagacatctggagcaattacagacagcaatttctttattctctacagatgtaagatacttgaagacattcctatgatgatgcagaattttggataacacggtattgatggtatctgttaccataattcctttgatggctgatagtgtcagagcacaagatttccaatctttgacaatttttagcaccattatctttgttttgatatctatatcagacagcatggtgcgtctgacaacacagggattaagacggaaagatgaaatgattctctcaacatcttcaatagataccttgctattttttctggcattatctatatgtgcgagaatatcctctagagaatcagtatcctttttgatgatagtggatctcaatgacatgggacgtctaaaccttcttattctatcaccagattgcatggtgatttgtcttctttcttttatcataatgtaatctctaaattcatcggcaaattgtctatatctaaaatcataatatgagatgtttacctctacaaatatctgttcgtccaatgttagagtatttacatcagttttgtattccaaattaaacatggcaacggatttaattttatattcctctattaagtcctcgtcgataataacagaatgtagataatcatttaatccatcgtacatggttggaagatgcttgttgacaaaatctttaattgtcttgatgaaggtgggactatatctaacatcttgattaataaaatttataacattgtccataggatactttgtaactagttttatacacatctcttcatcggtaagtttagacagaatatcgtgaacaggtggtatattatattcatcagatatacgaagaacaatgtccaaatctatattgtttaatatattatataaatgtagcgtagctcctacaggaatatctttaactaagtcaatgatttcatcaaccgttagatctattttaaagttaatcatataggcattgatttttaaaaggtatgtagccttgactacattctcattaattaaccattccaagtcactgtgtgtaagaagattatattctatcataagcttgactacatttggtcccgataccattaaagaattcttatgatataaggaaacagcttttaggtactcatctactctacaagaattttggagagccttaacgatatcagtgacgtttattatttcaggaggaaaaaacctaacattgagaatatcggaattaatagcttccagatacagtgattttggcaatagtccgtgtaatccataatccagtaacacgagctggtgcttgctagacaccttttcaatgtttaatttttttgaaataagctttgataaagccttcctcgcaaattccggatacatgaacatgtcggcgacatgattaagtattgttttttcattattttctcaataccccaatagatgatagaatatcacccaatgcgtccatgttgtctatttccaacaggtcgctatatccaccaatagaagtttttccaaaaaagattctaggaacagttctaccaccagtaatttgttcaaaatagtcacgcaattcattttcgggtttaaattctttaatatcgacaatttcatacgctcctcttttgaaactaaacttatttagaatatccagtgcatttctacaaaaaggacatgtatacttgacaaaaattgtcactttgttattggccaacctttgttgtacaaattcctcggccattttaatatttaagtgatataaaactatctcgacttatttaactctttagtcgagatatatggacgcagatagctatatgatagccaactacagaaggcaaacgctataaaaaacataattacgacgagcatatttataaatatttttattcagcattacttgatatagtaatattaggcacagtcaaacattcaaccactctcgatacattaactctctcattttctttaacaaattctgcaatatcttcgtaaaaagattcttgaaactttttagaatatctatcgactctagatgaaatagcgttcgtcaacatactatgttttgtatacataaaggcgcctattttaacagtttctagtgacaaaatgctagcgatcctaggatcctttagaatcacatagattgacgattcgtctctcttagtaactctagtaaaataatcatacaatctagtacgcgaaataatattatccttgacttgaggagatctaaacaatctagttttgagaacatcgataagttcatcgggaatgacatacatactatctttaatagaactcttttcatccagttgaatggattcgtccttaaccaactgattaatgagatcttctattttatcattttccagatgatatgtatgtccattaaagttaaattgtgtagcgcttttttttagtctagcagccaatactttaacatcactaatatcgatatacaaaggagatgatttatctatggtattaagaattcgtttttcgacatccgtcaaaaccaattcctttttgcctgtatcatccagttttccatcctttgtaaagaaattattttctactagactattaataagactgataaggattcctccataattgcacaatccaaactttttcacaaaactagactttacaagatctacaggaatgcgtacttcaggtttcttagcttgtgattttttcttttgcggacattttctagtaaccaactcatctaccatttcattgattttagcagtgaaataagctttcaatgcacgggcactgatactattgaaaacgagttgatcttcaaattccgccatttaagttcaccaaacaacttttaaatacaaatatatcaatagtagtagaataagaactataaaaaaaataataattaaccaataccaaccccaacaaccggtattattagttgatgtgactgttttctcatcacttagaacagatttaacaatttctataaagtctgtcaaatcatcttccggagaccccataaatacaccaaatatagcggcgtacaacttatccatttatacattgaatattggcttttctttatcgctatcttcatcatattcatcatcaatatcaacaagtcccagattacgagccagatcttcttctacattttcagtcattgatacacgttcactatctccagagagtccgataacgttagccaccacttctctatcaatgattagtttcttgagcgcgaaagtaatttttgtttccgttccggatctatagaagacgataggtgtgataattgccttggccaattgtctttctcttttactgagtgattctagttcaccttctatagatctgagaatggatgattctccagtcgaaacatattctaccatggatccgtttaatttgttgatgaagatggattcatccttaaatgttttctctgtaatagtttccaccgaaagactatgcaaagaatttggaatgcgttccttgtgcttaatgtttccatagacggcttctagaagttgatacaacataggactagccgcggtaacttttatttttagaaagtatccatcgcttctatcttgtttagatttatttttataaagtttagtctctccttccaacataataaaagtggaagtcatttgactagataaactatcagtaagttttatagagatagacgaacaattagcgtattgagaagcatttagtgtaacgtattcgatacattttgcattagatttactaatcgattttgcatactctataacacccgcacaagtctgtagagaatcgctagatgcagtaggtcttggtgaagtttcaactctcttcttgattaccttactcatgattaaacctaaataattgtactttgtaatataatgatatatattttcactttatctcatttgagaataaaaatgtttttgtttaaccactgcatgatgtacagatttcggaatcgcaaaccaccagtggttttattttatccttgtccaatgtgaattgaatgggagcggatgcgggtttcgtacgtagatagtacattcccgtttttagaccgagactccatccgtaaaaatgcatactcgttagtttggaataactcggatctgctatatggatattcatagattgactttgatcgatgaaggctcccctgtctgcagccatttttatgatcgtcttttgtggaatttcccaaatagttttataaactcgcttaatatcttctggaaggtttgtattctgaatggatccaccatctgccataatcctattcttgatctcatcattccataattttctctcggttaaaactctaaggagatgcggattaactacttgaaattctccagacaatactctccgagtgtaaatattactggtatacggttccaccgactcattatttcccaaaatttgagcagttgatgcagtcggcataggtgccaccaataaactatttctaagaccgtatgttctgattttatcttttagaggttcccaattccaaagatccgacggtacaacattccaaagatcatattgtagaataccgttactggcgtacgatcctacatatgtatcgtatggtccttccttctcagctagttcacaactcgcctctaatgcaccgtaataaatggtttcgaagatcttcttatttagatcttgtgcttccaggctatcaaatggataatttaagagaataaacgcgtccgctaatccttgaacaccaataccgataggtctatgtctcttattagagatttcagcttctggaataggataataattaatatctataattttattgagatttctgacaattactttgaccacatccttcagtttgagaaaatcaaatcgcccatctattacaaacatgttcaaggcaacagatgccagattacaaacggctacctcattagcatccgcatattgtattatctcagtgcaaagattactacacttgatagttcctaaattttgttgattactctttttgttacacgcatccttataaagaatgaatggagtaccagtttcaatctgagattctataatcgctttccagacgactcgagcctttattatagatttgtatctcctttctctttcgtatagtgtatacaatcgttcgaactcgtctccccaaacattgtccaatccaggacattcatccggacacatcaacgaccactctccgtcatccttcactcgtttcataaagagatcaggaatccaaagagctataaatagatctctggttctatgttcctcgtttcctgtattctttttaagatcgaggaacgccataatatcagaatgccacggttccaagtatatggccataactccaggccgtttgtttcctccctgatctatgtatctagcggtgttattataaactctcaacattggaataataccgtttgatataccattggtaccggagatatagcttccactggcacgaatattactaattgatagacctattccccctgccattttagagattaatgcgcatcgttttaacgtgtcatagataccctctatgctatcatcgatcatgttaagtagaaaacagctagacatttggtgacgactagttcccgcattaaataaggtaggagaagcgtgcgtaaaccatttttcagaaagtagattgtacgtctcaatagctgagtctatatcccattgatgaattcctactgcgacacgcattaacatgtgctgaggtctttcaacgatcttgttgtttattttcaacaagtaggatttttccaaagttttaaaaccaaaatagttgtatgaaaagtctcgttcgtaaataataaccgagttgagtttatccttatatttgttaactatatccatggtgatacttgaaataatcggagaatgtttcccatttttaggattaacatagttgaataaatcctccatcacttcactaaatagtttttttgtttccttgtgtagatttgatacggctattctggcggctagaatggcataatccggatgttgtgtagtacaagtggctgctatttcggctgccagagtgtccaattctaccgttgttactccattatatattccttgaataaccttcatagctattttaataggatctatatgatccgtgtttaagccataacataattttctaatacgagacgtgattttatcaaacatgacattttccttgtatccatttcgtttaatgacaaacatttttgttggtgtaataaaaaaattatttaacttttcattaatagggatttgacgtatgtagcgtacaaaattatcgttcctggtatatagataaagagtcctatatatttgaaaatcgttacggctcgattaaactttaatgattgcatagtgaatatatcattaggatttaactccttgactatcatggcggcgccagaaattaccatcaaaagcattaatacagttatgccgatcgcagttagaacggttatagcatccaccatttatatctaaaaattagatcaaagaatatgtgacaaagtcctagttgtatactgagaattgacgaaacaatgtttcttacatatttttttcttattagtaactgacttaatagtaggaactggaaagctagacttgattattctataagtatagatacccttccagataatgttctctttgataaaagttccagaaaatgtagaattttttaaaaagttatcttttgctattaccaagattgtgtttagacgcttattattaatatgagtgatgaaatccacaccgcctctagatatcgcctttatttccacattagatggtaaatccaatagtgaaactatctttttaggaatgtatggactcgcgtttagaggagtgaacgtcttaggcgtcggaaaggatgattcatcaaacgaataaacaatttcacaaatggatgttaatgtattagtaggaaattttttgacgctagtggaattgaagattctaatggatgatgttctacctatttcatccgataacatgttaatttccgacaccaacggttttaatatttcgatgatatacggtagtctctctttcggacttatatagcttattccacaatacgagtcattatatactccaaaaaacaaaataactagtataaaatctgtatcgaatgggaaaaacgaaattatcgacataggtatagaatccggaacattgaacgtattaatacttaattctttttctgtggtaagtactgataggttattgacattgtatggttttaaatattctataacttgagacttgatagatattagtgatgaattgaaaattatttttatcaccacgtgtgtttcaggatcatcgtcgacgcccgtcaaccaaccgaacggagtaaaataaatatcattaatatatgctctaaatattagtatttttatcaatcctttgattatcatcttctcgtaggcgaatgattccatgatcaagagtgatttgagaacatcctccggagtattaatgggcttagtaaacagtccatcgttgcaataataaaagttatccaagttaaaggatattatgcattcgtttaaagatatcacctcatctgacggagacaattttttggtaggttttagagactttgaagctacttgtttaacaaagttattcatcgtcgtctactattctatttaattttgtagttaatttatcacatatcacattaattgactttttggtccacttttccatacgtttatattcttttaatcctgcgttatccgtttccgttatatccagggatagatcttgcaagttaaatagaatgctcttaaataatgtcattttcttatccgctaaaaatttaaagaatgtataaacctttttcagagatttgaaactcttaggtggtgtcctagtacacaatatcataaacaaactaataaacattccacattcagattccaacagctgattaacttccacattaatacagcctattttcgctccaaatgtacattcgaaaaatctgaataaaacatcgatgtcacaatttgtattatccaatacagaatgtttgtgattcgtgttaaaaccatcggagaaggaatagaaataaaaattattatagtggtggaattcagttggaatattgcctccggagtcataaaaggatactaaacattgttttttatcataaattacacatttccaatgagacaaataacaaaatccaaacattacaaatctagaggtagaacttttaattttgtctttaagtatatacgataagatatgtttattcataaacgcgtcaaatttttcatgaatcgctaaggagtttaagaatctcatgtcaaattgtcctatataatccacttcggatccataagcaaactgagagactaagttcttaatacttcgattgctcatccaggctcctctctcaggctctattttcatcttgacgacctttggattttcaccagtatgtattcctttacgtgataaatcatcgattttcaaatccatttgtgagaagtctatcgccttagatactttttcccgtagtcgaggtttaaaaaaatacgctaacggtatactagtaggtaactcaaagacatcatatatagaatggtaacgcgtctttaactcgtcggttaactctttcttttgatcgagttcgtcgctactattgggtctgctcaggtgccccgactctactagttccaacatcataccgataggaatacaagacactttgccggcggttgtagatttatcatatttttccactacatatccgttacaatttgttaaaaatttagatacatctatattgctacataatccagctagtgaatatatatgacataataaattggtaaatcctagttctggtattttactaattactaaatctgtatatctttccatttatcatggaaaagaatttaccagatatcttcttttttccaaactgcgttaatgtattctcttacaaatattcacaagatgaattcagtaatatgagtaaaacggaacgtgatagtttctcattggccgtgtttccagttataaaacatagatggcataacgcacacgttgtaaaacataaaggaatatacaaagttagtacagaagcacgtggaaaaaaagtatctcctccatcactaggaaaacccgcacacataaacctaaccgcgaagcaatatatatacagtgaacacacaataagctttgaatgttatagttttctaaaatgtataacaaatacagaaatcaattcgttcgatgagtatatattaagaggactattagaagctggtaatagtttacagatattttccaattccgtaggtaaacgaacagatactataggtgtactagggaataagtatccatttagcaaaattccattggcctcattaactcctaaagcacaacgagagatattttcagcgtggatttctcatagacctgtagttttaactggaggaactggagtgggtaagacgtcacaggtacccaagttattgctttggtttaattatttatttggtggattctctactctagataaaatcactgactttcacgaaagaccagtcattctatctcttcctaggatagctttagttagattgcatagcaataccattttaaaatcattgggatttaaggtactagatggatctcctatttctttacggtacggatctataccggaagaattaataaacaaacaaccaaaaaaatatggaattgtattttctacccataagttatctctaacaaaactatttagttatggcactcttattatagacgaagttcatgagcatgatcaaataggagatattattatagcagtagcgagaaagcatcatacgaaaatagattctatgtttttaatgactgccacgttagaggatgacagggaacggctaaaagtatttttacctaatcccgcatttatacatattcctggagatacactgtttaaaattagcgaggtatttattcataataagataaatccatcttccagaatggcatacatagaagaagaaaagagaaatttagttactgctatacagatgtatactcctcctgatggatcatccggtatagtctttgtggcatccgttgcacagtgtcacgaatataaatcatatttagaaaaaagattaccgtatgatatgtatattattcatggtaaggtcttagatatagacgaaatattagaaaaagtgtattcatcacctaatgtatcgataattatttctactccttatttggaatccagcgttactatacgcaatgttacacacatttatgatatgggtagagtttttgtccccgctccttttggaggatcgcaacaatttatttctaaatctatgagagatcaacgaaaaggaagagtaggaagagttaatcctggtacatacgtctatttctatgatctgtcttatatgaagtctatacagcgaatagattcagaatttctacataattatatattgtacgctaataagtttaatctaacactccccgaagatttgtttataatccctacaaatttggatattctatggcgtacaaaggaatatatagactcgttcgatattagtacagaaacatggaataaattattatccaattattatatgaagatgatagagtatgctaaactttatgtactaagtcctattctcgctgaggagttggataactttgagaggacgggagaattaactagtattgtacgagaagccattttatctctaaatttacaaattaagattttaaattttaaacataaagatgatgatacgtatatacacttttgtaaaatattattcggtgtctataacggaacaaacgctactatatattatcatagacctctaacgggatatatgaatatgatttcagatactatatttgttcctgtagataataactaaaaatcaaactctaatgaccacatctttttttagagatgaaaaattttccacatctccttttgtagacacgactaaacattttgcagaaaaaagtttattagtgtttagataatcgtatacttcatcagtgtagatagtaaatgtgaacagataaaaggtattcttgctcaatagattggtaaattccatagaatatattaatcctttcttcttgagatcccacatcatttcaaccagagacgttttatccaatgatttacctcgtactataccacatacaaaactagattttgcagtgacgtcgtacctggtattcctaccaaacaaaattttacttttagttcttttagaaaattctaaggtagaatctctatttgccaatatgtcatctatggaattaccactagcaaaaaatgatagaaatatatattgatacatcgcagctggttttgatctactatactttaaaaacgaatcagattccataattgcctgtatatcatcagctgaaaaactatgttttacacgtattccttcggcatttctttttaatgatatatcttgtttagacaatgataaagttatcatgtccatgagagacgcgtctccgtatcgtataaatatttcattagatgttagacgcttcattaggggtatacttctataaggtttcttaatcagtccatcattggttgcgtcaagaactactatcggatgttgttgggtatctctagtgttacacatggccttactaaagtttgggtaaataactatgatatctctattaattatagatgcatatatttcattcgtcaaggatattagtatcgacttgctatcgtcattaatacgtgtaatgtaatcatataaatcatgcgatagccaaggaaaatttaaatagatgttcatcatataatcgtcgctataattcatattaatacgttgacattgactaatttgtaatatagcctcgccacgaagaaagctctcgtattcagtttcatcgataaaggataccgttaaatataactggttgccgatagtctcatagtctattaagtggtaagtttcgtacaaatacagaatccctaaaatattatctaatgttggattaatctttaccataactgtataaaatggagacggagtcataactattttaccgtttgtacttactggaatagatgaaggaataatctccggacatgctggtaaagacccaaatgtctgtttgaagaaatccaatgttccaggtcctaatctcttaacaaaaattacgatattcgatcccgatatcctttgcattctatttaccagcatatcacgaactatattaagattatctatcatgtctattctcccaccgttatataaatcgcctccgctaagaaacgttagtatatccatacaatggaatacttcatttctaaaatagtattcgttttctaattctttaatgtgaaatcgtatactagaaagggaaaaattatctttgagttttccgttagaaaagaaccacgaaactaatgttctgattgcgtccgattccgttgctgaattaatggatttacaccaaaaactcatataacttctagatgtagaagcattcgctaaaaaattagtagaatcaaaggatataagtagatgttccaacaagtgagcaattcccaagatttcatctatatcattctcgaatccgaaattagaaattcccaagtagatatcctttttcatccgatcgttgatgaaaatacgaactttattcggtaagacaatcatttactaaggagtaaaataggaagtaatgttcgtatgtcgttatcatcgtataaattaaaggtgtgttttttaccattaagtgacattataattttaccaatattggaattataatataggtgtatttgcgcactcgcgacggttgatgcatcggtaaatatagctgtatctaatgttctagtcggtatttcatcatttcgctgtctaataatagcgttttctctatctgtttccattacagctgcctgaagtttattggtcggataatatgtaaaataataagaaatacatacgaataacaaaaataaaataagatataataaagatgccatttagagatctaattttgtttaacttgtccaaattcctacttacagaagatgaggaatcgttggagatagtgtcttccttatgtagaggatttgaaatatcttataatgacttgataacttactttccagataggaaataccataaatatatttataaagtatttgaacatgtagatttatcggaggaattaagtatggaattccatgatacaactctgagagatttagtctatcttagattgtacaagtattccaagtgtatacggccgtgttataaattaggagataatctaaaaggcatagttgttataaaggacaggaatatttatattagggaagcaaatgatgacttgatagaatatctcctcaaggaatacactcctcagatttatacatattctaatgagcgcgtccccataactggttcaaaattaattctttgtggattttctcaagttacatttatggcgtatacaacgtcgcatataacaacaaataaaaaggtagatgttctcgtttccaaaaaatgtatagatgaactagtcgatccaataaattatcaaatacttcaaaatttatttgataaaggaagcggaacaataaacaaaatactcaggaagatattttattcggtaacaggtggccaaactccataggtagctttttctatttcggattttagaatttccaaattcaccagcgatttatcggttttggtgaaatccaaggatttattaatgtccacaaatgccatttgttttgtctgtggattgtatttgaaaatggaaacgatgtagttagatagatgcgctgcgaagtttcctattagggttccgcgcttcacgtcacccagcatacttgaatcaccatcctttaaaaaaaatgataagatatcaacatggagtatatcatactcggattttaattcttctactgcatcactgacattttcacaaatactacaatacggtttaccgaaaataatcagtacgttcttcatttatgggtatcaaaaacttaaaatcgttactgctggaaaataaatcactgacgatattagatgataatttatacaaagtatacaatggaatatttgtggatacaatgagtatttatatagccgtcgccaattgtgtcagaaacttagaagagttaactacggtattcataaaatacgtaaacggatgggtaaaaaagggagggcatgtaaccctttttatcgatagaggaagtataaaaattaaacaagacgttagagacaagagacgtaaatattctaaattaaccaaggacagaaaaatgttagaattagaaaagtgtacatccgaaatacaaaatgttaccggatttatggaagaagaaataaaggcagaaatgcaattaaaaatcgataaactcacatttcaaatatatttatctgattctgataacataaaaatatcattgaatgagatactaacacatttcaacaataatgagaatgttacattattttattgtgatgaacgagacgcagaattcgttatgtgtctcgaggctaaaacacatttctctaccacaggagaatggccgttgataataagtaccgatcaggatactatgctatttgcatctgctgataatcatcctaagatgataaaaaacttaactcaactgtttaaatttgttccctcggcagaggataactatttagcaaaattaacggcgttagtgaatggatgtgatttctttcctggactctatggggcatctataacacccaccaacttaaacaaaatacaattgtttagtgattttacaatcgataatatagtcactagtttggcaattaaaaattattatagaaagactaactctaccgtagacgtgcgtaatattgttacgtttataaacgattacgctaatttagacgatgtctactcgtatattcctccttgtcaatgcactgttcaagaatttatattttccgcattagatgaaaaatggaatgaatttaaatcatcttatttagaaagcgtgccgttaccctgccaattaatgtacgcgttagaaccacgcaaggagattgatgtttcagaagttaaaactttatcatcttatatagatttcgaaaatactaaatcagatatcgatgttataaaatctatatcctcgatcttcggatattctaacgaaaactgtaacacgatagtattcggcatctataaggataatttactactgagtataaataattcattttactttaacgatagtctgttaataaccaatactaaaagtgataatataataaatataggttactagattaaaaatggtgttccaactcgtgtgctctacatgcggtaaagatatttctcacgaacgatataaattgattatacgaaaaaaatcattaaaggatgtactcgtcagtgtaaagaacgaatgttgtaggttaaaattatctacacaaatagaacctcaacgtaacttaacagtgcaacctctattggatataaactaatatggatccggttaattttatcaagacatatgcgcctagaggttctattatttttattaattataccatgtcattaacaagtcatttgaatccatcgatagaaaaacatgtgggtatttattatggtacgttattatcggaacacttggtagttgaatctacctatagaaaaggagttcgaatagtcccattggatagtttttttgaaggatatcttagtgcaaaagtatacatgttagagaatattcaagttatgaaaatagcagctgatacgtcattaactttattgggtattccgtatggatttggtcataatagaatgtattgttttaaattggtagctgactgttataaaaatgccggtattgatacatcgtctaaacgaatattgggcaaagatatttttctgagccaaaacttcacagacgataatagatggataaagatatatgattctaataatttaacattttggcaaattgattaccttaaagggtgagttaatatgcataactactcctccgttgttttttccctcgttctttttcttaacgttgtttgccatcactctcataatgtaaagatattctaaaatggtaaacttttgcatatcggacgcagaaattggtataaatgttgtaattgtattatttcccgtcaatggactagtcacagctccatcagttttatatcctttagagtatttctcactcgtgtctaacattctagagcattccatgatctgtttatcgttgatattggccggaaagatagattttttattttttattatattactattggcaattgtagatataacttctggtaaatatttttctaccttttcaatctcttctattttcaagccggctatatattctgctatattgttgctagtatcaataccttttctggctaagaagtcatatgtggtattcactatatcagttttaactggtagttccattagcctttccacttctgcagaataatcagaaattggttctttaccagaaaatccagctactataataggctcaccgatgatcattggcaaaatcctatattgtaccagattaatgagagcatatttcatttccaataattctgctagttcttgagacattgatttatttgatgaatctagttggttctctagatactctaccatttctgccgcatacaataacttgttagataaaatcagggttatcaaagtgtttagcgtggctagaatagtgggcttgcatgtattaaagaatgcggtagtatgagtaaaccgttttaacgaattatatagtctccagaaatctgtggcgttacatacatgagccgaatgacatcgaagattgtccaatatttttaatagctgctctttgtccattatttctatatttgactcgcaacaattgtagataccattaatcaccgattcctttttcgatgccggacaatagcacaattgtttagctttggactctatgtattcagaattaatagatatatctctcaatacagattgcactatacattttgaaactatgtcaaaaattgtagaacgacgctgttctgcagccatttaactttaaataatttacaaaaatttaaaatgagcatccgtataaaaatcgataaactgcgccaaattgtggcatatttttcagagttcagtgaagaagtgtctataaatgtagactcgacggatgagttaatgtatatttttgccgccttgggcggatctgtaaacatttgggccattatacctctcagtgcatcagtgttttaccgaggagccgaaaacattgtgtttaatcttccggtgtccaaggtaaaatcgtgtttgtgtagttttcacaatgatgccatcatagatatagaacctgatctggaaaataatctagtaaaactttctagttatcatgtagtaagtgtcgattgtaataaggaactgatgcctattaggacagatactactatttgtctaagtatagatcaaaagaaatcttacgtgtttaattttcacaagtatgaagaaaaatgttgtggtagaaccgtcattcatttagaatggttgttgggctttatcaagtgtattagtcagcatcagcatttggctattatgtttaaagatgacaatattattatgaagactcctggtaatactgatgcattttccagggaatattctatgactgaatgttctcaagaactacaaaagttttctttcaaaatagctatctcgtctctcaacaaactacgaggattcaaaaagagagtcaatgtttttgaaactagaatcgtaatggataatgacgataacattttaggaatgttgttttcggatagagttcaatcctttaagatcaacatctttatggcgtttttagattaatactttcaatgagataaatatgggtggcggagtaagtgttgagctccctaaacgggatccgcctccgggagtacccactgatgagatgttattaaacgtggataaaatgcatgacgtgatagctcccgctaagcttttagaatatgtgcatataggaccactagcaaaagataaagaggataaagtaaagaaaagatatccagagtttagattagttaacacaggacccggtggtctttcggcattgttaagacaatcgtataatggaaccgcacccaattgctgtcgcacttttaatcgtactcattattggaagaaggatggaaagatatcagataagtatgaagagggtgcagtattagaatcgtgttggccagacgttcacgacactggaaaatgcgatgttgatttattcgactggtgtcagggggatacgttcgatagaaacatatgccatcagtggatcggttcagcctttaataggagtaatagaactgtagagggtcaacaatcgttaataaatctgtataataagatgcaaacattatgtagtaaagatgctagtgtaccaatatgcgaatcatttttgcattatttacgcgcacacaatacagaagatagcaaagagatgatcgattatattctaagacaacagtctgcggactttaaacagaaatatatgagatgtagttatcccactagagataagttagaagagtcattaaaatatgcggaacctcgagaatgttgggatccagagtgttcgaatgccaatgttaatttcttactaacacgtaattataataatttaggactttgcaatattgtacgatgtaatactagcgtgaacaacttacagatggataaaacttcctcattaagattgtcatgtggattaagcaatagtgatagattttctactgttcccgtcaatagagcaaaagtagttcaacataatattaaacactcgttcgacctaaaattgcatttgatcagtttattatctctcttggtaatatggatactaattgtagctatttaaatgggtgccgcggcaagcatacagacgacggtgaatacactcagcgaacgtatctcgtctaaattagaacaagaagcgaacgctagtgctcaaacaaaatgtgatatagaaatcggaaatttttatatccgacaaaaccatggatgtaacctcactgttaaaaatatgtgctctgcggacgcggatgctcagttggatgctgtgttatcagccgctacagaaacatatagtggattaacaccggaacaaaaagcatacgtgccagctatgtttactgctgcgttaaacattcagacgagtgtaaacactgttgttagagattttgaaaattatgtgaaacagacttgtaattctagcgcggtcgtcgataacaaattaaagatacaaaacgtaatcatagatgaatgttacggagccccaggatctccaacaaatttggaatttattaatacaggatctagcaaaggaaattgtgccattaaggcgttgatgcaattgactactaaggccactactcaaatagcacctaaacaagttgctggtacaggagttcagttttatatgattgttatcggtgttataatattggcagcgttgtttatgtactatgccaagcgtatgttgttcacatccaccaatgataaaatcaaacttattttagccaataaggaaaacgtccattggactacttacatggacacattctttagaacttctccgatggttattgctaccacggatatgcaaaactgaaaatatattgataatattttaatagattaacatggaagttatcgctgatcgtctagacgatatagtgaaacaaaatatagcggatgaaaaatttgtagattttgttatacacggtctagagcatcaatgtcctgctatacttcgaccattaattaggttgtttattgatatactattatttgttatagtaatttatatttttacggtacgtctagtaagtagaaattatcaaatgttgttggtgttggtggcgctagtcatcacattaactattttttattactttatactataatagtactagactgacttctaacaaacatctcacctgccataaataaatgcttgatattaaagtcttctatttctaacactattccatctgtggaaaataatactctgacattatcgctaattgacacatcggtgagtgatatgcctataaagtaataatcttctttgggcacatataccagtgtaccaggttctaacaacctatttactggtgctcctgtagcatactttttctttaccttgagaatatccatcgtttgcttggtcaatagcgatatgtgattttttatcaaccactcgaaaaagtaattggagtgttcatatcctctacgggctattgtctcatggccgtgtatgaaatttaagtaacacgactgtggtagatttgttctatagagccggttgccgcaaatagatagaactaccaatatgtctgtacaaatgttaaacattaattgattaacagaaaaaacaatgttcgttctgggaatagaaaccagatcaaaacaaaattcgttagaatatatgccacgtttatacatggaatataaaataactacagtttgaaaaataacagtatcatttaaacatttaacttgcggggttaatctcacaactttactgtttttgaactgttcaaaatatagcatcgatccgtgagaaatacgtttagccgcctttaatagaggaaatcccaccgcctttctggatctcaccaacgacgatagttctgaccagcaactcatttcttcatcatccacctgttttaacatataataggcaggagatagatatccgtcattgcaatattccttctcgtaggcacacaatctaatattgataaaatctccattctcttctctgcatttattatcttgtctcggtggctgattaggctgtggtcttggtttaggccttggtctatcgttgttgaatctattttggtcattaaatctttcatttcttcctggtatatttctatcacctcgtttggttggatttttgtctatattatcgtttgtaacatcggtacgggtattcatttatcacaaaaaaaacttctctaaatgagtctactgctagaaaacctcatcgaagaagataccatattttttgcaggaagtatatctgagtatgatgatttacaaatggttattgccggcgcaaaatccaaatttccaagatctatgctttctatttttaatatagtacctagaacgatgtcaaaatatgagttggagttgattcataacgaaaatatcacaggagcaatgtttaccacaatgtataatataagaaacaatttgggtctaggagatgataaactaactattgaagccattgaaaactatttcttggatcctaacaatgaagttatgcctcttattattaataatacggatatgactgccgtcattcctaaaaaaagtggtaggagaaagaataagaacatggttatcttccgtcaaggatcatcacctatcttgtgcattttcgaaactcgtaaaaagattaatatttataaagaaaatatggaatccgcgtcgactgagtatacacctatcggagacaacaaggctttgatatctaaatatgcgggaattaatgtcctgaatgtgtattctccttccacatccataagattgaatgccatttacggattcaccaataaaaataaactagagaaacttagtactaataaggaactagaatcgtatagttctagccctcttcaagaacccattaggttaaatgattttctgggactattggaatgtgttaaaaagaatattcctctaacagatattccgacaaaggattgattactataaatggagaatgttcctaatgtatactttaatcctgtgtttatagagcccacgtttaaacattctttattaagtgtttataaacacagattaatagttttatttgaagtattcgttgtattcattctaatatatgtattttttagatctgaattaaatatgttcttcatgcctaaacgaaaaatacccgatcctattgatagattacgacgtgctaatctagcgtgtgaagacgataaattaatgatctatggattaccatggatgacaactcaaacatctgcgttatcaataaatagtaaaccgatagtgtataaagattgtgcaaagcttttgcgatcaataaatggatcacaaccagtatctcttaacgatgttcttcgcagatgatgattcattttttaagtatttggctagtcaagatgatgaatcttcattatctgatatattgcaaatcactcaatatctagactttctgttattattattgatccaatcaaaaaataaattagaagccgtgggtcattgttatgaatctctttcagaggaatacagacaattgacaaaattcacagactctcaagattttaaaaaactgtttaacaaggtccctattgttacagatggaagggtcaaacttaataaaggatatttgttcgactttgtgattagtttgatgcgattcaaaaaagaatcctctctagctaccaccgcaatagatcctattagatacatagatcctcgtcgcgatatcgcattttctaacgtgatggatatattaaagtcgaataaagtgaacaataattaattctttattgtcatcatgaacggcggacatattcagttgataatcggccccatgttttcaggtaaaagtacagaattaattagacgagttagacgttatcaaatagctcaatataaatgcgtgactataaaatattctaacgataatagatacggaacgggactatggacgcatgataagaataattttgaagcattggaagcaactaaactatgtgatgtcttggaatcaattacagatttctccgtgataggtatcgatgaaggacagttctttccagacattgttgaattctgtgagcgtatggcaaacgaaggaaaaatagttatagtagccgcactcgatgggacatttcaacgtaaaccgtttaataatattttgaatcttattccattatctgaaatggtggtaaaactaactgctgtgtgtatgaaatgctttaaggaggcttccttttctaaacgattgggtgaggaaaccgagatagagataataggaggtaatgatatgtatcaatcggtgtgtagaaagtgttacgtcggctcataatattatattttttatctaaaaaactaaaaataaacattgattaaattttaatataatacttaaaaatggatgttgtgtcgttagataaaccgtttatgtattttgaggaaattgataatgagttagattacgaaccagaaagtgcaaatgaggtcgcaaaaaaactgccgtatcaaggacagttaaaactattactaggagaattattttttcttagtaagttacagcgacacggtatattagatggtgccaccgtagtgtatataggatcggctcctggtacacatatacgttatttgagagatcatttctataatttaggagtgatcatcaaatggatgctaattgacggccgccatcatgatcctattttaaatggattgcgtgatgtgactctagtgactcggttcgttgatgaggaatatctacgatccatcaaaaaacaactgcatccttctaagattattttaatttctgatgtgagatccaaacgaggaggaaatgaacctagtacggcggatttactaagtaattacgctctacaaaatgtcatgattagtattttaaaccccgtggcatctagtcttaaatggagatgcccgtttccagatcaatggatcaaggacttttatatcccacacggtaataaaatgttacaaccttttgctccttcatattcagctgaaatgagattattaagtatttataccggtgagaacatgagactgactcgagttaccaaattagacgctgtaaattatgaaaaaaagatgtactaccttaataagatcgtccgtaacaaagtagttgttaactttgattatcctaatcaggaatatgactattttcacatgtactttatgctgaggaccgtgtactgcaataaaacatttcctactactaaagcaaaggtactatttctacaacaatctatatttcgtttcttaaatattccaacaacatcaactgaaaaagttagtcatgaaccaatacaacgtaaaatatctagcaaaaattctatgtctaaaaacagaaatagcaagagatccgtacgcggtaataaatagaaacgtactactgagatatactaccgatatagagtataatgatttagttactttaataaccgttagacataaaattgattctatgaaaactgtgtttcaggtatttaacgaatcatccataaattatactccggttgatgatgattatggagaaccaatcattataacatcgtatcttcaaaaaggtcataacaagtttcctgtaaattttctatacatagatgtggtaatatctgacttatttcctagctttgttagactagatactacagaaactaatatagttaatagtgtactacaaacaggcgatggtaaaaagactcttcgtcttcccaaaatgttagagacggaaatagttgtcaagattctctatcgccctaatataccattaaaaattgttagatttttccgcaataacatggtaactggagtagagatagccgatagatctgttatttcagtcgctgattaatcaattagtagagatgagataagaacattataataatcaataatatatcttatatcttatatcttatatcttatatcttgtttagaaaaatgctaatattaaaatagctaacgctagtaatccaatcggaagccatttgatatctataatagggtatctaatttcctgatttaaatagcggacagctatattctcggtagctactcgtttggaatcacaaacattatttacatctaatttactatctgtaatggaaacgtttcccaatgaaatggtacaatccgatacattgcattttgttatatttttttttaaagaggctggtaacaacgcatcgcttcgtttacatggctcgtaccaacaataatagggtaatcttgtatctattcctatccgtactatgcttttatcaggataaatacatttacatcgtatatcgtctttgttagcatcacagaatgcataaatttgttcgtccgtcatgataaaaatttaaagtgtaaatataactattatttttatagttgtaataaaaagggaaatttgattgtatactttcggttctttaaaagaaactgacttgataaaaatggctgtaatctctaaggttacgtatagtctatatgatcaaaaagagattaatgctacagatattatcattagtcatgttaaaaatgacgacgatatcggtaccgttaaagatggtagactaggtgctatggatggggcattatgtaagacttgtgggaaaacggaattggaatgtttcggtcactggggtaaagtaagtatttataaaactcatatagttaagcctgaatttatttcagaaattattcgtttactgaatcatatatgtattcactgcggattattgcgttcacgagaaccgtattccgacgatattaacctaaaagagttatcgggacacgctcttaggagattaaaggataaaatattatccaagaaaaagtcatgttggaacagtgaatgtatgcaaccgtatcaaaaaattactttttcaaagaaaaaggtttgtttcgtcaacaagttggatgatattaacgttcctaattctctcatctatcaaaagttaatttctattcatgaaaagttttggccattattagaaattcatcaatatccagctaacttattttatacagactactttcccatccctccgttgattattagaccggctattagtttttggatagatagtatacccaaagagaccaatgaattaacttacttattaggtatgatcgttaagaattgtaacttgaatgctgatgaacaggttatccagaaggcggtaatagaatacgatgatattaaaattatttctaataacactaccagtatcaatttatcatatattacatccggcaaaaataatatgattagaagttatatcgtcgcccgacgaaaagatcagaccgctagatctgtaattggtcccagtacatctatcaccgttaatgaggtaggaatgcccgcatatattagaaatacacttacagaaaagatatttgttaatgcctttacagtggataaagttaaacaactattagcgtcaaaccaagttaaattttactttaataaacgattaaaccaattaacaagaatacgccaaggaaagtttattaaaaataaaatacatttattgcctggtgattgggtagaagtagctgttcaagaatatacaagtattatttttggaagacagccgtctctacatagatacaacgtcatcgcttcatctatcagagctaccgaaggagatactatcaaaatatctcccggaattgccaactctcaaaatgctgatttcgacggggatgaggaatggatgatattagaacaaaatcctaaagctgtaattgaacaaagtattcttatgtatccgacgacgttactcaaacacgatattcatggagcccccgtttatggatctattcaagatgaaatcgtagcagcgtattcattgtttaggatacaagatctttgtttagatgaagtattgaacatcttggggaaatatggaagagagttcgatcctaaaggtaaatgtaaattcagcggtaaagatatctatacttacttgataggtgaaaagattaattatccgggtctcttaaaggatggtgaaattattgcaaacgacgtagatagtaattttgttgtggctatgaggcatctgtcattggctggactcttatccgatcataagtcgaacgtggaaggtatcaactttattatcaagtcatcttatgtttttaagagatatctatctatttacggttttggggtgacattcaaagatctgagaccaaattcgacgttcactaataaattggaggccatcaacgtagaaaaaatagaacttatcaaagaagcatacgccaaatatctcaacgatgtaagagacgggaaaatagttccattatctaaagctttagaggcggactatgtggaatccatgttatccaacttgacaaatcttaatatccgagagatagaagaacatatgagacaaacgctgatagatgatccagataataacctcctgaaaatggccaaagcgggttataaagtaaatcccacagaactaatgtatattctaggtacgtatggacaacaaaggattgatggtgaaccagcagagactcgagtattgggtagagttttaccttactatcttccagactctaaggatccagaaggaagaggttatattcttaattctttaacaaaaggattaacgggttctcaatattacttttcgatgctggttgcaagatctcaatctactgatatcgtctgtgaaacatcacgtaccggaacactggctagaaaaatcattaaaaagatggaggatatggtggtcgacggatacggacaagtagttataggtaatacgctcatcaagtacgccgccaattataccaaaattctaggctcagtatgtaaacctgtagatcttatctatccagatgagtccatgacttggtatttggaaattagtgctctgtggaataaaataaaacagggattcgtttactctcagaaacagaaacttgcaaagaagacattggcgccgtttaatttcctagtattcgtcaaacccaccactgaggataatgctattaaggttaaggatctgtacgatatgattcataacgtcattgatgatgtgagagagaaatacttctttacggtatctaatatagattttatggagtatatattcttgacgcatcttaatccttctagaattagaattacaaaagaaacggctatcactatctttgaaaagttctatgaaaaactcaattatactctaggtggtggaactcctattggaattatttctgcacaggtattgtctgagaagtttacacaacaagccctgtccagttttcacactactgaaaaaagtggtgccgtcaaacaaaaacttggtttcaacgagtttaataacttgactaatttgagtaagaataagaccgaaattatcactctggtatccgatgatatctctaaacttcaatctgttaagattaatttcgaatttgtatgtttgggagaattaaatccagacatcactcttcgaaaagaaacagataggtatgtagtagatataatagtcaatagattatacatcaagagagcagaaataaccgaattagtcgtcgaatatatgattgaacgatttatctcctttagcgtcattgtaaaggaatggggtatggaaacattcattgaggatgaggataatattagatttactgtctacctaaatttcgttgaaccggaagaattgaatcttagtaagtttatgatggttcttccgggtgccgccaacaagggaaagattagtaaattcaagattcctatctctgactatacgggatatgacgacttcaatcaaacaaaaaagctcaataagatgactgtagaactcatgaatctaaaagaattgggttctttcgatttggaaaacgtcaacgtgtatcctggagtatggaatacatacgatatcttcggtatcgaggccgctcgtgaatacttgtgcgaagccatgttaaacacctatggagaagggttcgattatctgtatcagccttgtgatcttctcgctagtttactatgtgctagttacgaaccagaatcagtgaataaattcaagttcggcgcagctagtactcttaagagagctacgttcggagacaataaagcattgttaaacgcggctcttcataaaaagtcagaacctattaacgataatagtagctgccacttttttagcaaggtccctaatataggaactggatattacaaatactttatcgacttgggtcttctcatgagaatggaaaggaaactatctgataagatatcttctcaaaagatcaaggaaatggaagaaacagaagacttttaattcttatcaataacatatttttctatgatctgtcttttaaacgatggattttccacaaatgcgcctctcaagtccctcatagaatgatacacgtataaaaaatatagcataggcgatgactccttatttttagacattagatatgccaaaatcatagccccgcttctatttactcccgcagcacaatgaaccaacacgggctcgtttcgttgatcacatttagataaaaaggcggttacgtcgtcaaaatatttactaatatcggtagttgtatcatctaccaacggtatatgaataatattaatattagagttaggtaatgtatatttatccatcgtcaaatttaaaacatatttgaacttaacttcagatgatggtgcatccatagcatttttataatttcccaaatacacattattggttacccttgtcattatagtgggagatttggctctgtgcatatctccagttgaacgtagtagtaagtatttatacaaacttttcttatccatttataacgtacaaatggataaaactactttatcggtaaacgcgtgtaatttagaatacgttagagaaaaggctatagtaggcgtacaagcagccaaaacatcaacacttatattctttgttattatattggcaattagtgcgctattactctggtttcagacgtctgataatccagtctttaatgaattaacgagatatatgcgaattaaaaatacggttaacgattggaaatcattaacggatagcaaaacaaaattagaaagtgatagaggtagacttctagccgctggtaaggatgatatattcgacttcaaatgtgtggatttcggcgcctattttatagctatgcgattggataagaaaacatatctgccgcaagctattaggcgaggtactggagacgcgtggatggttaaaaaggcggcaaaggtcgatccatctgctcaacaattttgtcagtatttgataaaacacaagtctaataatgttattacttgtggtaatgagatgttaaatgaattaggttatagcggttattttatgtcaccgcattggtgttccgattttagtaatatggaatagtgttagataaatgcggtaacgaatgttcctgtaaggaaccataacagcttagatttaacgttaaagatgagcataaacataataaacaaaattacaatcaaacttataacattaatatcaaacaatccaaaaaatgaaatcagtggagtagtaaacgcgtacataactcctggataacgtttagcagctgccgttcctattctagaccaaaaattcggtttcatgttttcgaaacggtattctgcaacaagtcgaggatcgtgttctacatatttggcggcgttatccagtatctgcctattgatcttcatttcgttttcgattctggctatttcaaaataaaatcccgatgatagacctccagactttataatttcatctacgatgttcagcgccgtagtaactttaataatataggctgataagctaacatcataccctcctgtatatgtgaatatggcatgatttttgtccattacaagctcggttttaactttattgcctgtaataatttctctcatctgtaggatatctatttttttgtcatgcattgccttcaagacgggacgaagaaacgtaatatcctcaataacgttatcgttttctacaataactacatattctacctttttattttctaactcagtaaaaaaattagaatcccatagggctaaatgtctagcgatatttcttttcgtttcctctgtacacatagtgttacaaaaccctgaaaagaagtgagtatacttgtcatcatttctaatgtttcctccagtccactgtataaacgcataatccttgtaatgatctggatcatccttgactaccacaacatttcttttttctggcataacttcgttgtcctttacatcatcgaacttctgatcattaatatgctcatgaacattaggaaatgtttctgatggaggtctatcaataactggcacaacaataacaggagttttcaccgccgccatttagttattgaaattaatcatatacaactctttaatacgagttatattttcgtctatccattgtttcacattgacatatttcgacaaaaagatataaaatgcgtattccaatgcttctctgtttaatgaattactaaaatatacaaacacgtcactgtctggcaataaatgatatcttagaatattgtaacaatttattttgtattgcacatgttcgtgatctatgagttcttcttcgaatggcataggatctccgaatctgaaaacgtataaataggagttagaataataatatttgagagtattggtaatatataaactctttagcggtataattagtttttttctctcaatttctatttttagatgtgatggaaaaatgactaattttgtagcattagtatcatgaactctaatcaaaatcttaatatcttcgtcacacgttagctctttgaagtttttaagagatgcatcagttggttctacagatggagtaggtgcaacaattttttgttctacacatgtatgtactggagccattgttttaactataatggtgcttgtatcgaaaaactttaatgcagatagcggaagctcttcgccgcgactttctacgtcgtaattgggttctaacgccgatctctgaatggatactagttttctaagttctaatgtgattctctgaaaatgtaaatccaattcctccggcattatagatgtgtatacatcggtaaataaaactatagtatccaacgatcccttctcgcaaattctagtcttaaccaaaaaatcgtatataaccacggagatggcgtatttaagagtggattcttctaccgttttgttcttggatgtcatataggaaactataaagtccgcactactgttaagaatgattactaacgcaactatatagtttaaattaagcattttggaaacataaaataactctgtagacgatacttgactttcgaataagtttgcagacaaacgaagaaagaacagacctctcttaatttcagaagaaaactttttttcgtattcctgacgtctagagtttatatcaataagaaagttaagaattagtcggttaatgttgtatttcattacccaagtttgagatttcataatattatcaaaagacatgataatattaaagataaagcgctgactatgaacgaaatagctatatggttcgctcaagaatatagtcttgttaaacgtggaaacgataactgtatttttaatcacgtcagcggcatctaaattaaatataggtatatttattccacacactctacaatatgccacaccatcttcataataaataaattcgttagcaaaattattaattttagtgaaatagttagcgtcaactttcatagcttccttcaatctaatttgatgctcacacggtgcgaattccactctaacatcccttttccatgcctcaggttcatcgatctctataatatctagttttttgcgtttcacaaacacaggctcgtctctcgcgatgagatctgtatagtaactatgtaaatgataactagatagaaagatgtagctatatagatgacgatcctttaagagaggtataataactttaccccaatcagatagactgttgttatggtcttcggaaaaagaatttttataaatttttccagtattttccaaatatacgtacttaacatctaaaaaatccttaatgataataggaatggataatccgtctattttataaagaaatacatatcgcacattatacttttttttggaaatgggaataccgatgtgtctacataaatatgcaaagtctaaatattttttagagaatcttagttggtccaaattcttttccaagtacggtaatagatttttcatattgaacggtatcttcttaatctctggttctagttccgcattaaatgatgaaactaagtcactatttttataactaacgattacatcacctctaacatcatcatttaccagaatactgatcttcttttgtcgtaaatacatgtctaatgtgttaaaaaaaagatcatacaagttatacgtcatttcatctgtggtattcttgtcattgaaggataaactcgtactaatctcttctttaacagcctgttcaaatttatatcctatatacgaaaaaatagcaaccagtgtttgatcatccgcgtcaatattctgttctatcgtagtgtataacaatcgtatatcttcttctgtgatagtcgatacgttataaaggttgataacgaaaatatttttatttcgtgaaataaagtcatcgtaggattttggacttatattcgcgtctagtagatatgcttttatttttggaatgatctcaattagaatagtctctttagagtccatttaaagttacaaacaactaggaaattggtttatgatgtataatttttttagtttttatagattctttattctatacttaaaaaatgaaaataaatacaaaggttcttgagggttgtgttaaattgaaagcgagaaataatcataaattatttcattatcgcgatatccgttaagtttgtatcgtaatggcgtggtcaattacgaataaagcggatactagtagcttcacaaagatggctgaaatcagagctcatctaaaaaatagcgctgaaaataaagataaaaacgaggatattttcccggaagatgtaataattccatctactaagcccaaaaccaaacgagccactactcctcgtaaaccagcggctactaaaagatcaaccaaaaaggaggaagtggaagaagaagtagttatagaggaatatcatcaaacaactgaaaaaaattctccatctcctggagtcagcgacattgtagaaagcgtggctgctgtagagctcgatgatagcgacggggatgatgaacctatggtacaagttgaagctggtaaagtaaatcatagtgctagaagcgatctctctgacctaaaggtggctaccgacaatatcgttaaagatcttaagaaaattattactagaatctctgcagtatcgacggttctagaggatgttcaagcagctggtatctctagacaatttacttctatgactaaagctattacaacactatctgatctagtcaccgagggaaaatctaaagttgttcgtaaaaaagttaaaacttgtaagaagtaaatgcgtgcacttttttataaagatggtaaactctttaccgataataattttttaaatcctgtatcagacgataatccagcgtatgaggttttgcaacatgttaaaattcctactcatttaacagatgtagtagtatatgaacaaacgtgggaggaggcgttaactagattaatttttgtgggaagcgattcaaaaggacgtagacaatacttttacggaaaaatgcatgtacagaatcgcaacgctaaaagagatcgtatttttgttagagtatataacgttatgaaacgaattaattgttttataaacaaaaatataaagaaatcgtccacagattccaattatcagttggcggtttttatgttaatggaaactatgttttttattagatttggtaaaatgaaatatcttaaggagaatgaaacagtagggttattaacactaaaaaataaacacatagaaataagtcccgatgaaatagttatcaagtttgtaggaaaggacaaagtttcacatgaatttgttgttcataagtctaatagactatataaaccgctattgaaactgacggatgattctagtcccgaagaatttctgttcaacaaactaagtgaacgaaaggtatacgaatgtatcaaacagtttggtattagaatcaaggatctccgaacgtatggagtcaattatacgtttttatataatttttggacaaatgtaaagtccatatctcctcttccgtcaccaaaaaagttaatagcgttaactatcaaacaaactgctgaagtggtaggtcatactccatcaatttcaaaaagagcttatatggcaacgactattttagaaatggtaaaggataaaaattttttagatgtagtatctaaaactacgttcgatgaattcctatctatagtcgtagatcacgttaaatcatctacggatggatgatatagatctttacacaaataattacaagaccgataaatggaaatggataagcgtatgaaatctctcgcaatgacagctttcttcggagagctaagcacattagatattatggcattgataatgtctatatttaaacgccatccaaacaataccattttttcagtggataaggatggtcagtttatgattgatttcgaatacgataattataaggcttctcaatatttggatctgaccctcactccgatatctggagatgaatgcaagactcacgcatcgagtatagccgaacaattggcgtgtgtggatattattaaagaggatattagcgaatatatcaaaactactccccgtcttaaacgatttataaaaaaataccgcaatagatcagatactcgcatcagtcgagatacagaaaagcttaaaatagctctagctaaaggcatagattacgaatatataaaagacgcttgttaataagtaaatgaaaaaaaactagtcgtttataataaaacacgatatggatgccaacgtagtatcatcttctactattgcgacgtatatagacgctttagcgaagaatgcttcagaattagaacagaggtctaccgcatacgaaataaataatgaattggaactagtatttattaagccgccattgattactttgacaaatgtagtgaatatctctacgattcaggaatcgtttattcgatttaccgttactaataaggaaggtgttaaaattagaactaagattccattatctaaggtacatggtctagatgtaaaaaatgtacagttagtagatgctatagataacatagtttgggaaaagaaatcattagtgacggaaaatcgtcttcacaaagaatgcttgttgagactatcgacagaggaacgtcatatatttttggattacaagaaatatggatcctctatccgactagaattagtcaatcttattcaagcaaaaacaaaaaactttacgatagactttaagctaaaatattttctaggatccggtgcccaatctaaaagttctttgttgcacgctattaatcatccaaagtcaaggcctaatacatctctggaaatagaattcacacctagagacaatgaaacagttccatatgatgaactaataaaggaattgacgactctctcgcgtcatatatttatggcttctccagagaatgtaattctttctccgcctattaacgcgcctataaaaacctttatgttgcctaaacaagatatagtaggtttggatctggaaaatctatatgccgtaactaagactgacggcattcctataactatcagagttacatcaaacgggttgtattgttattttacacatcttggttatattattagatatcctgttaagagaataatagattccgaagtagtagtctttggtgaggcagttaaggataagaactggaccgtatatctcattaagctaatagagcccgtgaatgctatcagtgatagactagaagaaagtaagtatgttgaatctaaactagtggatatttgtgatcggatagtattcaagtcaaagaaatacgaaggtccgtttactacaactagtgaagtcgtcgatatgttatctacatatttaccaaagcaaccagaaggtgttattctgttctattcaaagggacctaaatctaacattgattttaaaattaaaaaggaaaatactatagaccaaactgcaaatgtagtatttaggtacatgtccagtgaaccaattatctttggagaatcgtctatctttgtagagtataagaaatttagcaacgataaaggctttcctaaagaatatggttctggtaagattgtgttatataacggcgttaattatctaaataatatctattgtttggaatatattaatacacataatgaagtgggtattaagtccgtggttgtacctattaagtttatagcagaattcttagttaatggagaaatacttaaacctagaattgataaaaccatgaaatatattaactcagaagattattatggaaatcaacataatatcatagtcgaacatttaagagatcaaagcatcaaaataggagatatctttaacgaggataaactatcggatgtgggacatcaatacgccaataatgataaatttagattaaatccagaagttagttattttacgaataaacgaactagaggaccgttgggaattttatcaaactacgtcaagactcttcttatttctatgtattgttccaaaacatttttagacgattccaacaaacgaaaggtattggcgattgattttggaaacggtgctgacctggaaaaatacttttatggagagattgcgttattggtagcgacggatccggatgctgatgctatagctagaggaaatgaaagatacaacaaattaaactctggaattaaaaccaagtactacaaatttgactacattcaggaaactattcgatccgatacatttgtctctagtgtcagagaagtattctattttggaaagtttaatatcatcgactggcagtttgctatccattattcttttcatccgagacattatgctaccgtcatgaataacttatccgaactaactgcttctggaggcaaggtattaatcactaccatggacggagacaaattatcaaaattaacagataaaaagacttttataattcataagaatttacctagtagcgaaaactatatgtctgtagaaaaaatagctgatgatagaatagtggtatataatccatcaacaatgtctactccaatgactgaatacattatcaaaaagaacgatatagtcagagtgtttaacgaatacggatttgttcttgtagataacgttgatttcgctacaattatagaacgaagtaaaaagtttattaatggcgcatctacaatggaagatagaccgtctacaaaaaactttttcgaactaaatagaggagccattaaatgtgaaggtttagatgtcgaagacttacttagttactatgttgtttatgtcttttctaagcggtaaataataatatggtatgggttctgatatccccgttctaaatgcattaaataattccaatagagcgatttttgttcctataggaccttccaactgtggatactctgtattgttaatagatatattaatacttttgtcgggtaacagaggttctacgtcttctaaaaataaaagttttataacatctggcctgttcataaataaaaacttggcgattctatatatactcttattatcaaatctagccattgtcttatagatgtgagctactgtaggtgtaccatttgattttctttctaatactatatatttctctcgaagaagttcttgcacatcatctgggaataaaatactactgttgagtaaatcagttattttttttatatcgatattgatggacatttttatagttaaggataataagtatcccaaagtcgataacgacgataacgaagtatttatacttttaggaaatcacaatgactttatcagattaaaattaacaaaattaaaggagcatgtatttttttctgaatatattgtgactccagatacatatggatctttatgcgtcgaattaaatgggtctagttttcagcacggtggtagatatatagaggtggaggaatttatagatgctggaagacaagttagatggtgttctacatccaatcatatatctaaagatatacccgaagatatgcacactgataaatttgtcatttatgatatatacacttttgacgctttcaagaataaacgattggtattcgtacaggtacctccgtcgttaggagatgatagtcatttgactaatccgttattgtctccgtattatcgtaattcagtagccagacaaatggtcaataatatgatttttaatcaagattcatttttaaaatatttattagaacatctgattagaagccactatagagtttctaaacatataacaatagttagatacaaggataccgaagaattaaatctaacgagaatatgttataatagagataagtttaaggcgtttgtattcgcttggtttaacggcgtttcggaaaatgaaaaggtactagatacgtataaaaaggtatctaatttgatataatgaattcagtgactgtatcacacgcgccatatactattacttatcacgatgattgggaaccagtaatgagtcaattggtagagttttataacgaagtagccagttggctgctacgagacgagacgtcgcctattcctgataagttctttatacagttgaaacaaccgcttagaaataaacgagtatgtgtgtgcggtatagatccgtatccgaaagatggaactggtgtaccgttcgaatcaccaaattttacaaaaaaatcaattaaggagatagcttcatctatatctagattaaccggagtaattgattataaaggttataaccttaatataatagacggggttataccctggaattattacttaagttgtaaattaggagaaacaaaaagtcacgcgatctactgggataagatttccaagttactgctgcagcatataactaaacacgttagtgttctttattgtttgggtaaaacagatttctcgaatatacgggcaaagttagaatccccggtaactaccatagtcggatatcatccagcggctagagaccgccaattcgagaaagatagatcatttgaaattatcaacgttttactggaattagacaacaaggcacctataaattgggctcaagggtttatttattaatgctttagtgaaattttaacttgtgttctaaatggatgcggctattagaggtaatgatgttatctttgttcttaagactataggtgtcccgtcagcgtgcagacaaaatgaagatccaagatttgtagaagcatttaaatgcgacgagttagaaagatatattgagaataatccagaatgtacactattcgaaagtcttagggatgaggaagcatactctatagtcagaattttcatggatgtagatttagacgcgtgtctagacgaaatagattatttaacggctattcaagattttattatcgaggtgtcaaactgtgtagctagattcgcgtttacagaatgcggtgccattcatgaaaatgtaataaaatccatgagatctaatttttcattgactaagtctacaaatagagataaaacaagttttcatattatctttttagacacgtataccactatggatacattgatagctatgaaacgaacactattagaattaagtagatcatctgaaaatccactaacaagatcgatagacactgccgtatataggagaaaaacaactcttcgggttgtaggtactaggaaaaatccaaattgcgacactattcatgtaatgcaaccaccgcatgataatatagaagattacctattcacttacgtggatatgaacaacaatagttattacttttctctacaacaacgattggaggatttagttcctgataagttatgggaaccagggtttatttcattcgaagacgctataaaaagagtttcaaaaatattcattaattctataataaactttaatgatctcgatgaaaataattttacaacggtaccactggtcatagattacgtaacaccttgtgcattatgtaaaaaacgatcgcataaacatccgcatcaactatcgttggaaaatggtgctattagaatttacaaaactggtaatccacatagttgtaaagttaaaattgttccgttggatggtaataaactgtttaatattgcacaaagaattttagacactaactctgttttattaaccgaacgaggagaccatatagtttggattaataattcatggaaatttaacagcgaagaacccttgataacaaaactaattttgtcaataagacatcaactacctaaggaatattcaagcgaattactctgtccaagaaaacgaaagactgtagaagctaacatacgagacatgttagtagattcagtggagaccgatacctatccggataaacttccgtttaaaaatggtgtattggacctggtagacggaatgttttactctggagatgatgctaaaaaatatacgtgtactgtatcaaccggatttaaatttgacgatacaaagttcgtcgaagacagtccagaaatggaagagttaatgaatatcattaacgatatccaaccattaacggatgaaaataagaaaaatagagagctatatgaaaaaacattatctagttgtttatgtggtgctaccaaaggatgtttaacattcttttttggagaaactgcaactggaaagtcgacaaccaaacgtttgttaaagtctgctatcggtgacctgtttgttgagacgggtcaaacaattttaacagatgtattggataaaggacctaatccatttatcgctaacatgcatttgaaaagatctgtattctgtagcgaactacctgattttgcctgtagtggatcaaagaaaattagatctgacaatattaaaaagttgacagaaccttgtgtcattggaagaccgtgtttctccaataaaattaataatagaaaccatgcgacaatcattatcgatactaattacaaacctgtttttgataggatagataacgcattaatgagaagaattgccgtcgtgcgattcagaacacacttttctcaaccttctggtagagaggctgctgaaaataatgacgcgtacgataaagtcaaactattagacgaggggttagatggtaaaatacaaaataatagatatagattcgcatttctatacttgttggtgaaatggtacagaaaatatcatgttcctattatgaaactatatcctacaccggaagagattcctgactttgcattctatctcaaaataggtactctgttagtatctagctctgtaaagcatattccattaatgacggacctctccaaaaagggatatatattgtacgataatgtggttactcttccgttgactactttccaacagaaaatatccaagtattttaattctagactatttggacacgatatagagagcttcatcaatagacataagaaatttgccaatgttagtgatgaatatctgcaatatatattcatagaggatatttcatctccgtaaatatatgctcatatatttatagaagatatcacatatctaaatgaataccggaatcatagatttatttgataatcatgttgatagtataccaactatattacctcatcagttagctactctagattatctagttagaactatcatagatgagaacagaagcgtgttattgttccatattatgggatcaggtaaaacaataatcgctttgttgttcgccttggtagcttccagatttaaaaaggtttacattctagtgccgaacatcaacatcttaaaaattttcaattataatatgggtgtagctatgaacttgtttaatgacgaattcatagctgagaatatctttattcattccacaacaagtttttattctcttaattataacgataacgtcattaattataacggattatctcgctacaataactctatttttatcgttgatgaggcacataatatctttgggaataatactggagaacttatgaccgtgataaaaaataaaaacaagattccttttttactattgtctggatctcccattactaacacacctaatactctgggtcatattatagatttaatgtccgaagagacgatagattttggtgaaattattagtcgtggtaagaaagtaattcagacacttcttaacgaacgcggtgtgaatgtacttaaggatttgcttaaaggaagaatatcatattacgaaatgcctgataaagatctaccaacgataagatatcacggacgtaagtttctagatactagagtagtatattgtcacatgtctaaacttcaagagagagattatatgattactagacgacagctatgttatcatgaaatgtttgataaaaatatgtataacgtgtcaatggcagtattgggacaacttaatctgatgaataatttagatactttatttcaggaacaggataaggaattgtacccaaatctgaaaataaataatggcgtgttatacggagaagaattggtaacgttaaacattagttccaaatttaaatactttattaatcggatacagacactcaacggaaaacattttatatacttttctaattctacatatggcggattggtaattaaatatatcatgctcagtaatggatattctgaatataatggttctcagggaactaatccacatatgataaacggcaaaccaaaaacatttgctatcgttactagtaaaatgaaatcgtctttagaggatctattagatgtgtataattctcctgaaaacgatgatggtagtcaattgatgtttttgttttcatcaaacattatgtccgaatcctatactctaaaagaggtaaggcatatttggtttatgactatcccagatactttttctcaatacaaccaaattcttggacgatctattagaaaattctcttacgccgatatttctgaaccagttaatgtatatcttttagccgccgtatattccgatttcaatgacgaagtgacgtcattaaacgattacacacaggatgaattaattaatgttttaccatttgacatcaaaaagctgttgtatctaaaatttaagacgaaagaaacgaatagaatatactctattcttcaagagatgtctgaaacgtattctcttccaccacatccatcaattgtaaaagttttattgggagaattggtcagacaatttttttataataattctcgtattaagtataacgataccaagttacttaaaatggttacatcagttataaaaaataaagaagacgctaggaattacatagatgatattgtaaacggtcacttctttgtatcgaataaagtatttgataaatctcttttatacaaatacgaaaacgatattattacagtaccgtttagactttcctacgaaccatttgtttggggagttaactttcgtaaagaatataacgtggtatcttctccataaaactgatgagatatataaagaaataaatgtcgagctttgttaccaatggatacctttccgttacattggaaccacacgagctgacgttagacataaaaactaatattaggaatgccgtatataagacgtatctccatagagaaattagtggtaaaatggccaagaaaatagaaattcgtgaagacgtggaattacctctcggcgaaatagttaataattctgtagttataaacgttccgtgtgtaataacctacgcgtattatcacgttggggatatagtcagaggaacattaaacatcgaagatgaatcaaatgtaactattcaatgtggagatttaatctgtaaactaagtagagattcgggtactgtatcatttagcgattcaaagtactgcttttttcgaaatggtaatgcgtatgacaatggcagcgaagtcactgccgttctaatggaggctcaacaaggtatcgaatctagttttgtttttcttgcgaatatcgtcgattcataaaaaagagaatagcggtaagtataaacacgaatactatggcaataattgcgaatgttttattctcttcgatatatttttgataatatgaaaaacatgtctctctcaaatcggacaaccatctcataaaatagttctcgcgcgctggagaggtagttgccgctcgtataatctctccagaataatatacttgcgtgtcgtcgttcaatttatacggatttctatagttctctgttatataatgcggttttccatcatgattagacgacgacaatagtgttctaaatttagatagttgatcagaatgaatgtttattggcgttggaaaaattatccatacagcgtctgcagagtggttgatagttgttcctagatatgtaaaataatccaacttactaggcagcaaattgtctagataaaatactgaatcaaacggtgcagacgtattggcggatctaatggaatccaattgattaactatcttttgaaaatatacatttttatgatccaatacttgtaagaatatagaaataatgataagtccatcatcgtgtttttttgcctcttcataagaactatattttttcttattccaatgaacaagattaatctctccagagtatttgtacacatctatcaagtgattggatccataatcgtcttcctttccccaatatatatgtagtgatgataacacatattcattggggagaaaccctccacttatatatcctcctttaaaattaatccttactagttttccagtgttctggatagtggttggtttcgactcattataatgtatgtctaacggcttcaatcgcgcgttagaaattgcttttttagtttctatattaataggagatagttgttgcggcatagtaaaaatgaaatgataactgtttaaaaatagctcttagtatgggaattacaatggatgaggaagtgatatttgaaactcctagagaattaatatctattaaacgaataaaagatattccaagatcaaaagacacgcatgtgtttgctgcgtgtataacaagtgacggatatccgttaataggagctagaagaacttcattcgcgttccaggcgatattatctcaacaaaattcagattctatctttagagtatccactaaactattacggtttatgtactacaatgaactaagagaaatctttagacggttgagaaaaggttctatcaacaatatcgatcctcactttgaagagttaatattattgggtggtaaactagataaaaaggaatctattaaagattgtttaagaagagaattaaaagaggaaagtgatgaacgtataacagtaaaagaatttggaaatgtaattctaaaacttacaacacgggataaattatttaataaagtatatataagttattgcatggcgtgttttattaatcaatcgttggaggatttatcgcatactagtatttacaatgtagaaattagaaagattaaatcattaaatgattgtattaacgacgataaatacgaatatctgtcttatatttataatatgctagttaatagtaaatgaacttttacagatctagtataattagtcagattattaagtataatagacgactagctaagtctattatttgcgaggatgactctcaaattattacactcacggcattcgttaaccaatgcctatggtgtcataaacgagtatccgtgtccgctattttattaactactgataacaaaatattagtatgtaacagacgagatagttttctctattctgaaataattagaactagaaacatgtttagaaagaaacgattatttctgaattattccaattatttgaacaaacaggaaagaagtatactatcgtcatttttttctctagatccagctactactgataatgatagaatagacgctatttatccgggtggcatacccaaaaggggtgagaatgttccagagtgtttatccagggaaattaaagaagaagttaatatagacaattcttttgtattcatagacactcggttttttattcatggcatcatagaagataccattattaataaattttttgaggtaatcttctttgtcggaagaatatctctaacgagtgatcaaatcattgatacatttaaaagtaatcatgaaatcaaggatctaatatttttagatccgaattcaggtaatggactccaatacgaaattgcaaaatatgctctagatactgcaaaacttaaatgttacggccatagaggatgttattatgaatcattaaaaaaattaactgaggatgattgattaaaaaatataaattaatttaccatcgtgtatttttataacgggattgtccggcatatcatgtagatagttaccgtctacatcgtatactcgaccatctacgcctttaaatcctctatttattgacattaatctattagaattggaataccaaatattagtaccctcaattagtttattggtaatattttttttagacgatagatcgatggctcttgaaaccaaggttttccaaccggactcattgtcgatcggtgagaagtctttttcattagcatgaatccattctaatgatgtatgtttaaacactctaaacaattggacaaattcttttgatttgctttgaatgatttcaaataggtcttcgtctacagtaggcataccattagataatctagccattataaagtgcacgtttacatatctacgttctggaggagtaagaacgtgactattgagacgaatggctcttcctactatctgacgaagagacgcctcgttccatgtcatatctaaaatgaagatatcattaattgagaaaaaactaataccctcgcctccactagaagagaatacgcatgttttaatgcattctccgttagtgtttgattcttggttaaactcagccaccgccttgattctagtatcttttgttctagatgagaactctatattagagataccaaagactttgaaatatagtaataagatttctattcctgactgattaacaaatggttcaaagactagacatttaccatgggatgctaatattcccaaacatacatctataaatttgacgcttttctcttttaattcagtaaatagagagatatcagccgcactagcatcccctttcaatagttctccctttttaaaggtatctaatgcggatttagaaaactctctatctcttaatgaatttttaaaatcattatatagtgttgctatctcttgcgcgtattcgcccggatcacgattttgtctttcaggaaagctatcgaacgtaaacgtagtagccatacgtctcagaattctaaatgatgatatacctgtttttatttcagcgagtttagccttttgataaatttcttcttgctttttcgacatattaacgtatcgcattaatactgttttcttagcgaatgatgcagacccttctacgtcatcaaaaatagaaaactcgttattaactatatacgaacatagtcctcctagtttggagactaattctttttcatcgactagacgtttattctcaaatagtgattggtgttgtaaggatcctggtcgtagtaagttaaccaacatggtgaattcttgcacactattgacgataggtgtagccgataaacaaatcatcttatggttttttaacgcaatggtcttagataaaaaattatatactgaacgagtaggacggatcttaccatcttctttgattaatgatttagaaatgaagttatgacattcatcaatgatgacgcatattctactcttggaattaatagttttgatattagtaaaaaatttatttctaaaattttgatcatcgtaattaataaaaatacaatccttcgttatctctggagcgtatctgagtatagtgttcatccaaggatcttctatcaaagcctttttcaccaataagataatagcccaattcgtataaatatccttaagatgtttgagaatatatacagtagtcattgttttaccgacacccgtttcatggaacaataaaagagaatgcatactgtctaatcctaagaaaactcttgctacaaaatgttgataatccttgaggcgtactacgtccgaccccatcatttcaacgggcatattagtagttctgcgtaaggcataatcgatataggccgcgtgtgatttactcatttatgagtgataagtaataactatgttttaaaaatcacagcagtagtttaactagtcttctctgatgtttgttttcgatactttttgaatcagaagtcatactagaataaagcaacgagtgaacgtaatagagagcttcgtatactctattcgaaaactctaagaacttattaatgaattccgtatccactggattgtttaaaatactaaattgaacactgttcacatccttccaagaagaagacttagtgacggacttaacatgagacataaataaatccaaattttttttacaaacatcactagccaccataatggcgctatctttcaaccagctatcgcttacgcattttagcagtctaacatttttaaagagactacaatatattctcatagtatcgattacacctctaccgaataaagttggaagtttaataatacaatatttttcgtttacaaaatcaaataatggtcgaaacacgtcgaaggttaacatcttataatcgctaatgtatagattgttttcagtgagatgattattagatttaatagcatctcgttcacgtttgaacagtttattgcgtgcgctgaggtcggcaactacggcgtccgctttagtactcctcccataatactttacgctattaatctttaaaatttcatagactttatctagatcgctttctggtaacatgatatcatgtgtaaaaagttttaacatgtcggtcggcattctatttagatcattaactctagaaatctgaagaaagtaattagctccgtattccagactaggtaatgggcttttacctagagacagattaagttctggcaatgtttcataaaatggaagaaggacatgcgttccctcccggatattttttacaatttcatccatttacaactctatagtttgttttcattattattagttattatctcccataatcttggtaatacttaccccttgatcgtaagataccttatacaggtcattacatacaactaccaattgtttttgtacataatagattggatggttgacatccatggtggaataaactactcgaacagatagtttatctttccccctagatacattagccgtaatagttgtcggcctaaagaatatctttggtgtaaagttaaaagttagggttcttgttccattattgctttttgtcagtagttcattataaattctcgagatgggtccgttctctgaatatagaacatcatttccaaatctaacttctagtctagaaataatatcggtcttattcttaaaatctattcccttgatgaagggatcgttaatgaacaaatccttggcctttgattcggctgatctattatctccgttatagacgttacgttgactagtccaaagacttacaggaatagatgtatcgatgatgttgatactatgtgatatgtgagcaaagattgttctcttagtggcatcactatatgttccagtaatggcggaaaactttttagaaatgttatatataaaagaattttttcgtgttccaaacattagcagattagtatgaagataaacactcatattatcaggaacattatcaatttttacatacacatcagcatcttgaatagaaacgataccatcttctggaacctctacgatctcggcagactccggataaccagtcggtgggccatcgctaacaataactagatcatccaacaatctactcacatatgcatctatataatctttttcatcttgtgagtaccctggatacgaaataaatttattatccgtatttccataataaggtttagtataaacagagagagatgttgccgcatgaacttcagttacagtcgccgttggttggtttatttgacctattactctcctaggtttctctataaacgatggtttaatttgtacattcttaaccatatatccaataaagctcaattcaggaacataaacaaattctttgttgaacgtttcaaagtcgaacgaagagtcacgaataacgatatcggatactggattgaaggttaccgttacggtaatttttgaatcggatagtttaagactgctgaatgtatcttccacatcaaacggagttttaatataaacgtatactgtagatggttctttaatagtgtcattaggagttaggccaatagaaatatcattaagttcactagaatatccagagtgtttcaaagcaattgtattattgatacaattattatataattcttcgccctcaatttcccaaataacaccgttacacgaagagatagatacgtgattaatacatttatatccaacatatggtacgtaactgaatcttcccatacctttaacttctggaagttccaaactcagaaccaaatgattaagcgcagtaatatactgatccctaatttcgaagctagcgatagcctgattgtctggaccatcgtttgtcataactccggatagagaaatatattgcggcatatacaaagttggaatttgactatcgactgcgaagacattagaccgtttaatagagtcatccccaccgatcaaagaattaatgatagtattattcattttctatttaaaatggaaaaagcttacaataaactccgtagagaaatatctataatttgtgagttttccttaaagtaacagcttccgtaaacgccgtctttatctcttagtaggtttattgtatttatgaccttttccttatcttcatagaatactaaaggcaacaaagaaatttttggttcttctctaagagctacgtgagacttaaccatagacgccaacgaatccctacatattttagaacagaaatacccaacttcaccacccttgaatgtctcaatactaataggtttaaaaaccaaatcttgattacaaaaccaacacttatcaattacactatttgtcttaatagacacatctgccatagatttataatactttggtagtatacaagcgagtgcttcttctttagcgggcttaaagactgctttaggtgctgaaataaccacatctggaaggcttactcgcttagccatttaattacggaactatttttttatacttctaatgagcaagtagaaaacctctcatctacaaaaacgtactcgtgtccataatcctctaccatagttacacgttttttagatctcatatgtgctaaaaagttttcccatactaattggttactattatttttcgtataatttttaacagtttgaggttttagatttttagttacagaagtgatatcgaatattttatccaaaaagaatgaataattaattgtcttagaaggagtgttttcttggcaaaagaataccaagtgcttaaatatttctactacttcattaatcttttctgtactcagattcagtttctcatcttttacttgattgattatttcaaagactaacttataatcctttttatttattctctcgttagccttaagaaaactagatacaaaatttgcatctacatcatccgtggatatttgatttttttccatgatatccaagagttccgagataatttctccagaacattgatgagacaataatctccgcaatacatttctcaaatgaataagtttattagacacatggaagtttgactttttttgtacctttgtacatttttgaaataccgactcgcaaaaaatacaatattcatatccttgttcagatactataccgttatgtctacaaccgctacataatcgtagattcatgttaacactctacgtatctcgtcgtccaatattttatataaaaacattttatttctagacgttgccagaaaatcctgtaatatttttagttttttgggctgtgaataaagtatcgccctaatattgttaccgtcttccgccaatatagtagttaaattatccgcacatgcagaagaacaccgcttaggcggattcagtacaatgttatatttttcgtaccaactcatttaaatatcataatctaaaatagttctgtaatatgtctagcgctaatatattgatcataatcctgtgcataaattaagatacaacaatgtctcgaaatcatcgacatggcttcttccatagttagaagatcgtcgtcaaagttagcaacgtgattcatcaacatttgctgttttgaggcagcaaatactgaaccgtcgccattcaaccattcataaaaaccatcgtctgaatccattgataatttcttgtactggtttttgagagctcgcatcaatctagcatttctagctcccggattgaaaacagaaagaggatcgtacatccagggtccattttctgtaaatagaatcgtataatgtcccttcaagaagatatcagacgatccacaatcaaagaattggtctccgagtttgtaacaaactgcggactttaacctatacatgataccgtttagcataatttctggtgatacgtcaatcggagtatcatctattagagatctaaagccggtgtaacattctccaccaaacatattcttattctgacgtcgttctacataaaacatcattgctccattaacgataacaggggaatgaacagcactacccatcacattagttcccaatggatcaatgtgtgtaactccagaacatcttccatagcctatgttaggaggagcgaacaccactcttccactattgccatcgaatgccatagaataaatatccttggaattgatagaaatcggactgtcggatgttgtgatcatcttcataggattaacaactatgtatggtgccgcctgaagtttcatatcgtaactgatgccgtttataggtctagccacagaaaccaacgtaggtctaaatccaactatagacaaaatagaagccaatatctgttcctcatctgtcataacttgagagcatccagtatgaataatcttcattagatggggatctaccgcatcatcatcgttacaataaaaaattcccattctaatgttcataattgcttttctaatcatggtatgcatgtttgctctctgaatctctgtggaaattagatctgatacacctgtaatcactatcggattatcctccgtaagacgattaaccaacaacatataattataagactttacttttctaaattcataaagttgctggattaggctataggtgtctccatgtacatacgcgttctcgagcgcaggaagtttaataccgaatagtgccatcagaataggatgaatatagtaattagtttctggttttctataaataaaagacaaatcttgtgaactagacatatcggtaaaatgcatggattggaatcgtgtagtcgacagaagaatatgatgattagatggagagtatattttatctaactctttgagttggtcaccgattctaggactagctcgagaatgaataagtactaaaggatgagtacatttcacagaaacactagcattgttcaatgtgctctttacatgggtaaggagttgaaatagctcgtttctatttgttctgacaatatttagtttattcataatgttaagcatatcctgaatagtaaagttagatgtgtcatacttgttagtagttagatatttagcaattgcattcccatcatttctcaatctcgtactccaatcatgtgtagatgctacttcatctatagaaaccatacaatcctttttgataggctgttgagattgattatttcctgcacgtttaggtttggtacgttgatttctagcccctgcggatataaagtcatcgtctacaatttgggacaatgaattgcatacactacaagacaaagatttatcagaagtgtgaatatgatcttcatctaccaaagaaagagtttgattagtataactagattttagtcctgcgttagatgttaaaaaaacatcgctattgaccacggcttccattatttatattcgtagtttttactcgaaagcgtgattttaatatccaatcttattacttttggaatcgttcaaaacctttgactaattgtagaatttgatctattgccctacgcgtatactcccttgcatcatatacgttcgtcaccagatcgtttgtttcggcctgaagttggtgcatatctttttcaacactcgacatgagatccttaagggccatatcgtctagattttgttgagatgctgctcctggatttggattttgttgtgctgttgtacatactgtaccaccagtaggtgtaggagtacatacagtggccacaataggaggttgaggaggtgtaaccgttggagtagtacaagaaatacttccatccgattgttgtgtacatgtagttgttggtaacgtctgagaaggttgggtagatggcggtgtcgtcgtcttttgatctttattaaatttagagataatatcctgaacagcattgctcggcgtcaacgctggaaggagtgaactcgccggcgcatcagtatcttcagacagccaatcaaaaagattagacatatcagatgatgtattagtttgttgtcgtggttttggtgtaggagcagtactactaggtagaagaataggagccgatgtagctgttggaaccggctgtggagttatatgaatagttggttgtagcggttggataggctgtctgctggcggccatcatattatctctagctagttgttctcgcaactgtctttgataatacgactcttgagactttagtcctatttcaatcgcttcatcctttttcgtatccggatccttttcttcagaataatagattgacgactttggtgtagaggattctgccagcctctgtgagaacttgttaaagaagtccatttaaggctttaaaattgaattgcgattataagattaaatggcagacacagacgatattatcgactatgaatccgatgatctcaccgaatacgaggatgatgaagaagaggaagaagatggagagtcactagaaactagtgatatagatcccaaatcttcttataagattgtagaatcagcatccactcatatagaagatgcgcattccaatcttaaacatatagggaatcatatatctgctcttaaacgacgctatactagacgtataagtctatttgaaatagcgggtataatagcagaaagctataacttgcttcaacgaggaagattacctctagtttcagaattttctgacgaaacgatgaagcaaaatatgctacatgtaattatacaagagatagaggagggttcttgtcctatagtcatcgaaaagaacggagaattgttgtcggtaaacgattttgacaaagatggtctaaaattccatctagactatattatcaaaatttggaaacttcaaaaacgatattagaatttatacgaatatcgttctctaaatgtcacaatcaagtctcgcatgttcagcaatttattgtcgtactttatatcgtgttcattaacgatatcttgcaaaatagtaatgattctatcttccttcgatagatattcttcagagattattgtcttatattctttcttgttatcagatatgaatttgataagactttgaacattattgatacccgtctgtttaattttttctacagatattttagttttggcagattctatcgtatctgtcaatagacatccaacatcgacattcgacgtcaattgtctataaatcaacgtataaattttagaaataacattagcgaattgttgtgcattgatgtcgttattctgaaacagtatgattttaggtagcattttcttaacaaagagaacgtatttattgttactcagttgaacagatgatatatccagattactaacgcatctgattccgtataccaaactttcagaagaaatggtgtacaattgtttgtattcattcaatgtctctttttcagaaattagtttagagtcgaatactgcaataattttcaagagatagttttcatcagataagattttatttagtgtagatatgataaaactattgttttgttggagaacttgatacgccgcgttctctgtagtcgacgctctcaaatgggaaacaatctccattatttttttggaatcggatactatatcttcggtatcttgacgcagtctagtatacatagagttaagagagattagagtttgtacattaagcaacatgtctctaaatgtggctacaaacttttcctttttcacatcatctagtttattatataccgatttcacaacggcaccagatttaaggaaccagaatgaaaaactctgataactacaatatttcatcatagttacgattttatcatcttctatagttggtgtaatagcgcatacctttttctccaagactggaaccaacgtcataaaaatgtttaaatcaaaatccatatcaacatctgatgcgctaagaccagtctcgcgttcaagattatctttactaatggtgacgaactcatcgtatagaactctaagtttgtccattatttatttacagatttagttgtttaatttatttgtgctcttccagagttgggatagtatttttctaacgtcggtattatattattaggatctacgttcatatgtatcataatattaatcatccacgttttgataaatctatctttagcttctgaaataacgtatttaaacaaaggagaaaaatatttagctacggcatcagacgcaataacattttttgtaaatgtaacgtatttagacgacagatcttcgttaaaaagttttccatctatgtagaatccatcggttgttaacaccattcccgcgtcagattgaataggagtttgaatagtttgttttggaaatagatccttcaataacttatagttgggtgggaaaaaatcgattttatcactagactctttcttttttactatcattacctcatgaactatttcttgaatgagtatatgtattttctttcctatatcggacgcgttcattggaaaatataccatgtcgttaactataagaatatttttatcctcgtttacaaactgaataatatcagatgtagttcgtaaacgaactatatcatcaccagcacaacatctaactatatgatatccactagtttcctttagccgtttattatcttgttccatattagcagtcattccatcatttaagaaggcgtcaaaaataatagggagaaatgacattttggattctgttacaactttaccaaaattaaggatatacggacttactatctttttctcaacgtcgatttgatgaacacacgatgaaaatgtgcttctatgagattgatcatgtagaaaacaacaagggatacaatattttcgcatatcatgaaatatattaagaaatcccaccttattatatttccccaaaggatccatgcacgtaaacattatgccgttatcattaataaagacttctttctcatcggatctgtaaaagttgttactgatttttttcattccaggatctagataattaataatgatgggttttctattcttattctttgtattttggcatatcctagaccagtaaacagtttccactttggtaaaatcagcagacttttgaacgctattaaacatggcattaatggcaataactaaaaatgtaaaatatttttctatgttaggaatatggtttttcactttaatagatatatggtttttggccaaaatgatagatatttttttatccgaggatagtaaaatattattagtcgccgtctctataaaaatgaagctagtctcgatatccaattttattctagaattgataggagtcgccaaatgtaccttatacgttatatctcccttgatgcgttccatttgtgtatctatatcggacacaagatctgtaaatagttttacgttattaatcatcacggtatcgccgtcgctagataacgctaatgtaccatccaagtcccaaatggagagatttaactgttcatcgtttagaataaaatgattaccggtcatattaataaagtgttcatcgtatctagataacaacgacttataattaatgtccaagtcttgaactcgctgaatgatcttttttaacccagttagttttagattggtacgaaatatattgttaaactttgattctacagtaatgtccaaatctagttgtggaaatacttccatcaacattgtttcaaacttgataatattattatctacatcttcgtacgatccaaattccggaatagatgtatcgcacgctcttgccacccagataaccaaaaagtcacacgctccaggatatacattgtataaaaagctatcgttttttagtagtgtttttttctgcgtgtatacgaagggattaaaaatagtattatcaacgtaactatattccaaattattcttatgagaatagataataatatcgtccttaatatctaacaaatttcctaaatatccctttaattgagtcattcgaagcgtcaatagaatatgtctcttaactatttccggctgttgtatatttaaatgacttcgtaaaaaataatatatgggcgacttctcatctatgtaatcatatggagtgagatatagggctcgttctacctcctgccccttacccacctgtaataccaattgcggacttactatatatcgcatatttatatcgtggggtaaagtgaaaatctactaccgatgatgtaagtcttacaatgttcgaaccagtaccagatcttaatttggaggcctccgtagaactaggggaggtaaatatagatcaaacaacacctatgataaaggaaaatagcggttttatatcccgcagtagacgtctattcgcccatagatctaaggatgatgagagaaaactagcactacgattctttttacaaagactttattttttagatcatagagagattcattatttgttcagatgcgttgacgctgtaaaagacgtcactattaccaaaaaaaataacattatcgtggcgccttatatagcacttttaactatcgcatcaaaaggatgcaaacttacagaaacaatgattgaagcattctttccagaactatataatgaacatagtaagaaatttaaattcaactctcaagtatccatcatccaagaaaaactcggataccagtttggaaactatcacgtttatgattttgaaccgtattactctacagtagctctggctattcgagatgaacattcatctggcatttttaatatccgtcaagagagttatctggtaagttcattatctgaaataacatatagattttatctaattaatctaaaatctgatcttgttcaatggagtgctagtacgggcgctgtaattaatcaaatggtaaatactgtattgattacagtgtatgaaaagttacaactggtcatagaaaatgattcacaatttacatgttcattggctgtggaatcaaaacttccaataaaattacttaaagatagaaatgaattatttacaaaattcattaacgagttaaaaaagaccagttcattcaagataagcaaacgcgataaggatacgctattaaaatattttacttaggactggagttagaatttatagacgactcatttcgtttatcattgttactattattactattactatcattattagtgttggcattattagtattcttcttgtcatcttgttcagaaatatacagcaatgctatacctaatactaaatacattatcatgctcgcaatggctctaacaacaacgaaccaaaatgaatttggtcgtagcttttgttcacaaaaatacataaagaaatgtctacataaatctatggcgccattggctacttgaaatagcgccagtcctcctacagattttaatatagctgtataacatgacatttattcatcatcaaaagagacagagtcaccatctgtcatatttagattttttttcatgtgttcaaagtatcctctactcatttcattataatagtttatcatacttagaattttaggacggatcaatgagtaagacttgactagatcgtcagtagtaatttgtgcatcgtctattctgcatccgcttcgtcgaataatgtatagcatcgctttgagattctccatagctatcaagtctttatacaatgacatggaaatatctgtgaatactttatacttctccaacatcgatgccttaacatcatcgcctactttagcattgaaaatacgttctattgtgtagatggatgtagcaagatttttaaacaacaatgccatcttacacgatgattgcctcaagtctccaatcgtttgtttagaacgattagctacagagtccaatgcttggctgactagcatattattatctttagaaattgtattcttcaatgaggcgtttatcatatctgtgatttcgttagtcatattacagtctgactgggttgtaatgttatccaacatatcacctatggatacggtacacgtaccagcatttgtaataatcctatctaagatgttgtatggcattgcgcagaaaatatcttctcctgtaatatctccactctcgataaatctactcagattattcttaaatgccttattctctggagaaaagatatcagtgtccatcatttcattaatagtatacgcagaaaagataccacgagtatcaattctatccaagatacttatcggttccgagtcacagataatggtttcctctccttcgggagatcctgcatagaaatatctaggacaatagtttctatactgtctgtaactctgataatctctaaagtcactaactgataccatgaaattgagaagatcaaacgctgaagtaattaatttttctgcctcgtttttactacaactagttttcatcaatgtagtgacgatgtattgtttagttacttttggtctaatactgatgatagagatattattgcttcccataatggatcttctagtagtcaccttaaagcccattgatgcgaatagcagatagataaagtcttggtatgactcctttctaatatagtacggactacctttgtcacccaactttatacccacataagccataacaacctctttaatagccgtttcatgaggtttatcagccatgagcctgagtagttggaagaatctcatgaatcccgtctcagaaagtcctatatgcatgatagatttatctttcctgggaaactctcgtatagtcatagatgaaatactctttaaagtttctgaaataagattagtaacagtcttacctccgactactctaggtaacaaacaaactctaataggtgttttctctgcggagataatatcagaaaggatagagcaataagtagtattattgtgattataaagaccgaatacataacaggtagaatttataaacatcatgtcctgaaggtttttagacttgtattcctcgtaatccataccgtcccaaaacatggatttggtaactttgatagccgtagatctttgttccttcgccaacaggttaaagaaattaataaagaatttgttgtttctatttatgtccacaaattgcacgtttggaagcgccacggttacattcactgcagcattttgaggatcgcgagtatgaagtacgatgttattgtttactggtatatctggaaagaaatctaccagtctaggaataagagattgatatcgcatagaaatagtaaagtttataatctcatcatcgaagagcattttgttaccattgtaataaatatccactctgtcatatgtataaatgaagtactgttcaaacatgatgagatgtttatatgttggcatagtagtgagatcgacgtttggtaatggcaatgtattaagattaactccataatgtctagcagcatctgcgatgttataagcgtcgtcaaagcggggtcgatcttgtattgttatatattgtctaacacctataagattatcaaaatcttgtctgcttaatacaccgttaacaatttttgccttgaattcttttattggtgcattaataacatccttatagaggatgttaaacaaataagtgttatcaaagttaagatctggatatttcttttctgctagaacatccattgagtcggagccatctggtttaatataaccaccgataaatctagctctgtattctgtatccgtcaatctaatattaagaaggtgttgagtgaaaggtggaagatcgtaaaagctgtgagtattaatgataggattagtttccgaactaatgttaattggggtattaataatatctatatttccagcgttaagtgtaacattaaacagttttaattcacgtgacgtggtatcaattaaataattaatgcccaatttggatatagcagcctgaagctcatcttgtttagttacggatcctaatgagttattaagcaatatatcgaacggatgaacgaaggttgttttaagttggtcacatactttgtaatctagacatagatgcggaagaacggtagaaactatacgaaataaatattcagagtcctctaattgatcaagagtaactattgacttaataggcatcatttatttagtattaaatgacgaccgtaccagtgacggatatacaaaacgatttaattacagagttttcagaagataattatccatctaacaaaaattatgaaataactcttcgtcaaatgtctattctaactcacgttaacaacgtggtagatagagaacataatgccgccgtagtgtcatctccagaggaaatatcctcacaacttaatgaagatctatttccagatgatgattcaccggccactattatcgaacgagtacaacctcatactactattattgacgatactccacctcctacgtttcgtagagagttattgatatcggaacaacgtcaacaacgagaaaaaagatttaatattacagtatcgaaaaatgctgaagcaataatggaatctagatctatgataacttctatgccaacacaaacaccatccttgggagtagtttatgataaagataaaagaattcagatgttagaggatgaagtggttaatcttagaaatcaacgatctaatacaaaatcatctgataatttagataattttaccaaaatactatttggtaagactccgtataaatcaacagaagttaataagcgtatagccatcgttaattatgcaaatttgaacgggtctcccttatcagtcgaggacttggatgtttgttcggaggatgaaatagatagaatctataaaacgattaaacaatatcacgaaagtagaaaacgaaaaattatcgtcactaacgtgattattattgtcataaacattatcgagcaggcattgctaaaactcggatttgaagaaatcaaaggactgagtaccgatatcacttcagaaattatcgatgtggagatcggagatgactgcgatgctgtagcatcaaaactaggaatcggtaacagtccggttcttaatattgtattgtttatactcaagatattcgttaaacgaattaaaattatttaatttaatacattcccatatccagacaacaatcgtctggattaatctgttcctgtcgtctcataccggacgacatattaatctttttattagtgggcatctttttagatggtttctttttcccagcattaactgattcgatacctagaagatcgtgattgatctctccgaccattccacgaacttctaattggccgtctctgacggtaccataaactattttaccagcattagtaacagcttggacaatctgaccatccatcgcattgtacgatgtagtagtaactgttgttctacgtctaggagcaccagaagtatttttggagcccttggaggctgatgtagaagaagacgaggattttgattttggtttacatgtaatacattttgaactctttgattttgtatcacatgcgccggcagtcacatctgtttgagaattaagattattgttgcctcctttgacggctgcatctccaccgatttgcgctagtagatttttaagctgtggtgtaatcttattaactgtttcgatataatcatcgtaactgcttctaacggctaaattttttttatccgccatttagaagctaaaaatatttttatttatgcagaagatttaactagattatacaatgaactaatatgatccttttccagattatttacaaacttggtattttttggttctggaggaggcgaatttaaattcggacttggattcggattttgtaagttcttgatcttattatacatcgagtataggatggcgacagtaactgctacacaaataccgatcaaaagaagaataccaatcatttattgacaataacttcactattgatcaagtatgcaatatatcatcttttcactaaataagtagtaataatgattcaacaatgtcgagatatatggacgataataatttagttcatggaaatatcgctatgattggtgtgaatgactccgctaactctgtggggtgcgcagtgctttccccacatagaataaattagcattccgactgtgataataataccaagtataaacgccataatactcaatactttccatgtacgagtgggactggtagacttactaaagtcaataaaggcgaagatacacgaaagaatcaaaagaatgattccagcgattagcacgccggaaaaataatttccaatcataagcatcatgtccatttaactaataaaaattttaaatcgccgaatgaacaaagtggaatataaaccatataaaaacaatagtttgtactgcaaaaataatatctatttttgttttcgaagatatggtaaaattaaatagtagtacacagcatgttataactaacagcagcaacggctcgtaattacttatcatttactagacgaaaaggtggtgggatattttcttgctcaaataatacgaatatatcacccatccattttatgcgatgtttatatactctaatctttaatagatctatagacgacgggtttaccaacaatatagattttatcgattcatctaatttaaacccttccttaaacgtgaatgatctattatctggcataacgatgaccctacctgatgaatcggacaatgtactgggccatgtagaataaattatcaacgaattatcgtctacgaacatttatatcatttgttttaattttaggacgcgaataaatggatataaaatagaaaataacagatattacaaccagtgttatggccgcgcccaaccaggtaggcagttttattttatcttttactacaggttctcctggatgtacgtcaccaacggcggacgtagttctagtacaattagacgtaagttccgcttgggaattttttaacgctaaagagttaacgttaatcgtgcacccaacgtatttacatctagttcgttgaacatcttgattataatataaccattttctatctctagattcgtcagtgcactcatgtaaccaacataccctaggtcctaaatatttatctccggaattagattttggataattcgcgcaccaacaatttctatttcctttatgatcgttacaaaagacgtataatgccgtatccccaaaagtaaaataatcaggacgaataattctaataaactcagaacaatatctcgcatccatatgtttggagcaaatatcggaataagtagacatagccggtttccgttttgcacgtaaccattctaaacaattggggtttccaggatcgtttctacaaaatccagtcatgaaatcgtcacaatgttctgtcttgtaattattattaaatatttttggacagtgtttggtatttgtcttagaacaacattttgccacgctatcactatcgcccaggagataatccttttttataaaatgacatcgttgcccggatgctatataatcagtagcgtgttttaaatccttaatatattcaggagttacctcgttctgataatagattaatgatccaggacgaaatttgaaagaactacatggttctccatgaattaatacatattgtttagcaaattcaggaactataaaactactacaatgatctatcgacataccatctatcaaacaaaacttgggtttaatttctcccggagatgtttcataatagtacgtataactttcttctgcaaacttaacagctctattatattcaggataattaaaacctaattccatatatttgtctcgtatatctgctattcctggtgctattttgattctattaagagtaacagctgcccccattcttaataatcgtcagtatttaaactgttaaatgttggtatatcaacatctaccttatttcccgcagtataaggtttgttgcaggtatactgttcaggaatggttacatttatacttcttctatagtcctgtctttcgatgttcatcacatatgcaaagaacagaataaacaaaataatgtaagaaataatattaaatatctgtgaattcgtaaatacattgattgccataataattacagcagctacaatacacacaatagacattcccacagtgttgccattacctccacgatacatttgagttactaagcaataggtaataactaagctagtaagaggcaatagaaaagatgagataaatatcatcaatatagagattagaggagggctatatagagccaagacgaacaaaatcaaaccgagtaacgttctaacatcattatttttgaagattcccaaataatcattcattcctccataatcgttttgcatcatacctccatctttaggcataaacgattgctgctgttcctctgtaaataaatctttatcaagcactccagcacccgcagagaagtcgtcaagcatattgtaatatcttaaataactcatttatatattaaaaaatgtcactattaaagatggagtataatctttatgccgaactaaaaaaaatgacttgtggtcaacccctaagtctttttaacgaagacggggatttcgtagaagttgaaccgggatcatcctttaagtttctgatacctaagggattttacgcctctccttccgtaaagacgagtctagtattcgagacattaacaacgaccgataataaaatcactagtatcaatccaacaaatgcgccaaagttatatcctcttcaacgcaaagtcgtatctgaagtagtttctaatatgaggaaaatgatcgaatcaaaacgtcctctatacattactcttcacttggcgtgtggatttggtaagactattaccacgtgttatcttatggctacacacggtagaaaaaccgtcatttgcgtacccaataaaatgttaatacatcaatggaagacacaggtagaggcagtcggattggaacataagatatccatagatggagtaagtagtctattaaaggaactaaagactcaaagtccggatgtattaatagtagtcagtagacatctgacaaacgatgccttttgtaaatatatcaataagcattatgatttgttcatcttggatgaatcacatacgtataatctgatgaacaatacagcagttacaagatttttagcgtattatcctccgatgatgtgttattttttaactgctacacctagaccatctaaccgaatttattgtaacagtattattaatattgccaagttatccaatctaaaaaaaactatctatgcagtagatagtttttttgagccatattccacagataatattagacatatggtaaaacgactagatggaccatctaataaatatcatatatataccgagaagttattatctgtagacgagcctagaaatcaacttattcttgataccctggtagaagaattcaagtcaggaactattaatcgcattttagttattactaaactacgtgaacatatggtattattctacaaacgattattagattttttcggaccagaggttgtatttataggagacgcccaaaatagacgtactccagatatggtcaaatcaatcaaggaactaaatagatttatattcgtatccaccttattttattccggtactggtttagatattcctagtttggattcgttgttcatttgctcggcagtaatcaacaatatgcaaatagagcaattactagggagggtatgtcgagaaacagaactattagataggacggtatatgtatttcctaacacatccatcaaagaaataaagtacatgataggaaatttcatgcaacgaattattagtctgtctgtagataaactaggatttaaacaaaaaagttatcggaaacatcaagaatccgatcccacttctgcatgtacaacatcatccagagaagaacgtgtattaaatagaatatttaactcgcaaaatcgttaagaagtttaagcgacgatccgcatgctgcgcaggccagtgtattacccctcatagtattaatataatccaatgatacttttgtgatgtcggaaatcttaaccaatttagactgacaggcagaacacgtcatgcaatcatcatcgtcatcgataactgtagtcttgggcttctttttgcgactcttcattccggaacgcacattggtgctatccatttaggtagtaaaaaataagtcagaatatgccctataacacgatcgtgcaaaacctggtatatcgtctctatctttatcacaatatagtgtatcgacatttttattattattgacctcgtttatcttggaacatggaatgggaacatttttgttatcaacggccatctttgccttaattccagatgttgtaaaattataactaaacagtctatcatcgacacaaatgaaattcttgtttagacgtttgtagtttacgtatgcggctcgttcgcgtctcattttttcagatattgcaggtactataatattaaaaataagaatgaaataacataggattaaaaataaagttatcatgacttctagcgctgatttaactaacttaaaagaattacttagtctgtacaaaagtttgagattttcagattctgcggctatagaaaagtataattctttggtagaatggggaacatctacttactggaaaataggcgtgcaaaaggtagctaatgtcgagacgtcaatatctgattattatgatgaggtaaaaaataaaccgtttaatattgatccgggctattacattttcttaccggtatattttgggagcgtctttatttattcgaagggtaaaaatatggtagaacttggatctggaaactcttttcaaataccagatgatatgcgaagtgcgtgtaacaaagtattagacagcgataacggaatagactttctgagatttgttttgttaaacaatagatggataatggaagatgctatatcaaaatatcagtctccagttaatatatttaaactagctagtgagtacggattaaacatacccaaatatttagaaattgaaatagaggaagacacattatttgacgacgagttatactctattatagaacgctctttcgatgataaatttccaaaaatatccatatcgtatattaagttgggagaacttagacggcaagttgtagactttttcaaattctcattcatgtatattgagtccatcaaggtagatcgtataggagataatatttttattcctagcgttataacaaaatcaggaaaaaagatattagtaaaagatgtagaccatttaatacgatccaaggttagagaacatacatttgtaaaagtaaaaaagaaaaacacattttccattttatacgactatgatggaaacggaacagaaactagaggagaagtaataaaacgaattatagacactataggacgagactattatgttaacggaaagtatttctctaaggttggtagtgcaggcttaaagcaattgactaataaattagatattaatgagtgcgcaactgtcgatgagttagttgatgagattaataaatccggaactgtaaaacgaaaaataaaaaaccaatcagcatttgatttaagcagagaatgtttgggatatccagaagcggattttataacgttagttaataacatgcggttcaaaatagaaaattgtaaggttgtaaatttcaatattgaaaatactaattgtttaaataacccgagtattgaaactatatatggaaactttaaccagttcgtctcaatctttaatgtcgtcaccgatgtcaaaaaaagattattcgagtgaaataatatgcgcctttgatataggtgcaaaaaatcctgccagaactgttttagaagtcaaggataactccgttagggtattggatatatcaaaattagactggagttctgattgggaaaggcgcatagctaaagatttgtcacaatatgaatacactacagttcttctagaacgtcagcctagaaggtcgccgtatgttaaatttatctattttattaaaggctttttatatcatacatcggctgccaaagttatttgcgtctcgcctgtcatgtctggtaattcatatagagatcgaaaaaagagatcggtcgaagcatttcttgattggatggacacattcggattgcgagactccgttccggatagacgcaaattagacgatgtagcggatagtttcaatttggctatgagatacgtattagataaatggaatactaattatacaccttataataggtgtaaatctagaaattacataaaaaaaatgtaataacgttagtaacgccattatggataatctatttacctttctacatgaaatagaagatagatatgccagaactatttttaactttcatctaataagttgcgatgaaataggagatatatatggtcttatgaaagaacgcatttcctcagaggatatgtttgataatatagtgtataataaagatatacatcctgccattaagaaactagtgtattgcgacatccaacttactaaacacattattaatcagaatacgtatccggtatttaacgattcttcacaagtgaaatgttgtcattatttcgacataaactcagataatagcaatattagctctcgtacagtagagatatttgagagggaaaagtcatctcttgtatcatatattaaaactaccaataagaagagaaaggtcaattacggcgaaataaagaaaactgttcatggaggcactaatgcaaattacttttccggtaaaaagtctgacgagtatctgagtactacagttagatccaacattaatcaaccttggatcaaaaccatctctaagaggatgagagttgatatcattaatcactctatagtaacgcgtggaaaaagctctatattacaaactatagaaattatttttactaatagaacatgtgtgaaaatattcaaggattctactatgcacattattctatccaaggacaaggatgaaaaggggtgtatacacatgattgacaaattattctatgtctattataatttatttctgttgttcgaagatatcatccaaaacgagtactttaaagaagtagctaatgttgtaaaccacgtactcacggctacggcattagatgagaaattattcctaattaagaaaatggctgaacacgatgtttatggagttagcaatttcaaaatagggatgtttaacctgacatttattaagtcgttggatcataccgttttcccctctctgttagatgaggatagcaaaataaagttttttaaggggaaaaagctcaatattgtagcattacgatctctggaggattgtataaattacgtgactaaatccgagaatatgatagaaatgatgaaggaaagatcgactattttaaatagcatagatatagaaacggaatcggtagatcgtctaaaagaattgcttctaaaatgaaaaaaaacactaattcagaaatggatcaacgactagggtataagtttttggtgcctgatcctaaagccggagttttttatagaccgttacatttccaatatgtatcgtattctaattttatattgcatcgattgcatgaaatcttgaccgtcaagcggccaatcttatcgtttaagaataatacagaacgaattatgatagaaattagcaatgttaaagtgactcctccagattactcacctataatcgcgagtattaaaggtaagagttatgacgcattagccacgttcactgtaaatatctttaaagaggtaatgaccaaagagggtatatccatcactaaaataagtagttatgagggaaaagattctcatttgataaaaattccgctactaataggatacgggaataaaaatccacttgatacagccaagtatcttgttcctaatgtcataggtggagtctttatcaataaacaatctgtcgaaaaagtaggaattaatctagtagaaaagattacaacatggccaaaatttagggttgttaagccaaactcattcactttctcgttttcctccgtatcccctcctaatgtattaccgacaagatatcgccattacaagatatctctggatatatcacaattggaagcgttgaatatatcatcgacaaagacatttataacggtcaatattgttttgctgtctcaatatttatctagagtgagtctagaattcattagacgtagtttatcatacgatatgcctccagaagttgtctatctagtaaacgcgataatagatagtgctaaacgaattactgaatctattactgactttaatattgatacatacattaatgacctggtggaagctgaacacattaaacaaaaatctcagttaacgattaacgagttcaaatatgaaatgctgcataactttttacctcatatgaactatacacccgatcaactaaagggattttatatgatatctttactaagaaagtttctctactgtatcttccacacttctagatatccagatagagattcgatggtttgtcatcgcatcctaacgtacggcaaatattttgagacgttggcacatgatgaattagagaattacataggcaacatccgaaacgatatcatgaacaatcacaagaacagaggcacttacgcggtaaacattcatgtactaacaactcccggacttaatcacgcgttttctagcttattgagtggaaagttcaaaaagtcagacggtagttatcgaacacatcctcactattcatggatgcagaatatttctattcctaggagtgttggattttatccggatcaagtaaagatttcaaagatgttttctgtcagaaaataccatccaagtcaatatctttacttttgttcatcagacgttccggaaagaggtcctcaggtaggtttagtatctcaattgtctgtcttgagttccattacaaatatactaacgtctgagtatttggatttggaaaagaaaatttgtgagtatatcagatcatattataaagatgatataagttactttgaaacaggatttccaatcactatagaaaatgctctagtcgcatctcttaatccaaatatgatatgtgattttgtaactgactttagacgtagaaaacggatgggattcttcggtaacttggaggtaggtattactttagttagggatcacatgaatgaaattcgcattaatattggagcgggaagattagtcagaccattcttggttgtggataacggagagctcatgatggatgtgtgtccggagttagaaagcagattagacgacatgacattctctgacattcagaaagagtttccgcatgtcatcgaaatggtagatatagaacaatttacttttagtaacgtatgtgaatcggttcaaaaatttagaatgatgtcaaaggatgaaagaaagcaatacgatttatgtgactttcctgccgaatttagagatggatatgtagcatcttcactagtgggaatcaatcacaattctggacccagagctattcttggatgtgctcaagctaaacaagctatctcttgtctgagttcggatatacgaaataaaatagacaatggaattcatttgatgtatccagagaggccaatcgtgattagtaaggctttagaaacttcaaagattgcggctaattgcttcggccaacatgttactatagcattaatgtcgtacaaaggtatcaatcaagaggatggaattatcatcaaaaaacaatttattcagagaggcggtctcgatattgttacagccaagaaacatcaagtagaaattccattggaaaactttaataacaaagaaagagataggtctaacgcctattcaaaattagaaagtaatggattagttagactgaatgctttcttggaatccggagacgctatggcacgaaatatctcatcaagaactcttgaagatgattttgctagagataatcagattagcttcgatgtttccgagaaatataccgatatgtacaaatctcgcgttgaacgagtacaagtagaacttactgacaaagttaaggtacgagtattaaccatgaaagaaagaagacccattctaggagacaaatttaccactagaacgagtcaaaagggaacagtcgcgtatgtcgcggatgaaacggaacttccatacgacgaaaatggtatcacaccagatgtcattattaattctacatccatcttctctagaaaaactatatctatgttgatagaagttattttaacagccgcatattctgctaagccgtacaacaataagggagaaaaccgacctgtctgttttcctagtagtaacgaaacatccatcgatacatatatgcaattcgctaaacaatgttatgagcattcaaatccgaaattgtccgatgaagaattatcggataaaatcttttgtgaaaagattctctatgatcctgaaacggataagccttatgcatccaaagtattttttggaccaatttattacttgcgtctgaggcatttaactcaggacaaggcaaccgttagatgtagaggtaaaaagacgaagctcattagacaggcgaatgagggacgaaaacgtggaggaggtatcaagttcggagaaatggagagagactgtttaatagcgcatggtgcagccaatactattacagaagttttgaaagattcggaagaagattatcaagatgtgtatgtttgtgaaaattgtggagacatagcagcacaaatcaagggtattaatacatgtcttagatgttcaaaacttaatctctctcctctcttaacaaaaattgataccacgcacgtatctaaagtatttcttactcaaatgaacgccagaggcgtaaaagtcaaattagatttcgaacgaaggcctccttcgttttataaaccattagataaagttgatctcaagccgtcttttctggtgtaatattctagtttggtagtagatacatatcaatatcatcaaattcgagatccgaattataaaatgggcgtggattgttaactatagaatcggacgtctgatattcgaaaatctgtggagtttcaggttttggtgaaggtgtaactgctacttgggatactgaagtctgatattcagaaagctgtggatgttctggttcgacatccaccgatggtgtcacatcactaatcggttcggtaacgtctgtggatggaggtgctacttctacagaacctgtagcctcagttgtcaacggagatacatttttaatgcgagaaaatgtataatttggtaatggtttcttatgtggatctgaagaagaggtaagatatctactagaaagataccgatcacgttctagttctcttttgtagaacttaactttttctttctccgcatctagttgatattccaacctcttcacgttactacgttcagattccaattcacgttcgcatgggttacctccgcagtttttacgagcgatttcacgttcagccttcatgcgtctctccctctctctatcgagtttatcagagcagtctttctgaaggcgatcgaactccataaatttctccaacgctttgattgtttccatagatttccgaagttcagcttttaggactgtgattctttttctttcgaattcacagctggatgtacaaccgtttccattaccgccatctctaagtttcttttctagatcggcaacatttcatccccatgccttttacattcctcgagtctactgtcgtcgaaatatcgttccagctccttttcgacatcaataactttagcacgttgtctctcaagctctcttttgtagttatctgattccctggcacgtttaagatcttcatgcaattgagtcagctcttaacttcctctcttgcttcttcgtcatagtacgcgcaatcactgtgagatccattgttaccacgtctacactcggcgagctcgcgtttaagagattcaatttcccgtttgtattggtccatgtttccattgctaccaccattagatttacaggctgctagttgtcgttcgagatcagaaatacgggttttcttggaattgatttcgtcgatgtacttggcatcgaaacacttattaagttctttttccaattctacgattttatttctttcgcgagtcaattccctcctgtagtaactatctgttttgtcagattcacgctctctacgtagactttcttgcaagttactaatttgttccctagcacgtccgagtttagttttatatgctgaatagagttctgattcatcctttgagcagatctctagcgatcgtttaagattcctaattctagtctttagcctatttacctcctcagaagatgttccgttaccgttgcgtttacactcgttaagctgtctatcaagatccatgattctatctctaagacgttgcatctctctttccatatcagcattgctttcattattacgtctgcagtcactcaactgtctttcaatatctgagattctatctctaagacgtcgcatctctctctgtttcggcattggtttcattattacgtttacagtcgttcaactgtctttcaagatctgatattctagattggagtctgctaatctctgtagcattttcacggcattcactcagttgtctttcaagatctgaaattttagattggagtctgctaatctctgtaagatttcctcctccgctctcgatgcagtcggtcaacttattctctagttctctaatacgcgaacgcagtgcatcaacttcttgcgtgtcttcctggttgcgtgtacattcatcgagatctctaacgcgtcgtcgttcttcctcaagttctctgcgtactacagaaagcgtgtccttatcttgttgatatttagcaatttctgattctagagtactgattttgcttacgtagttactaatatttgtcttggccttatcaagatcctccttgtatttgtcgcattccttgatatccctacgaagtctggacagttcccattcgacattacgacgtttatcgatttcagctcggagatcgtcatcgcgttgttttagccacatacgactgagttcaagttctcgttgacaagatccatctacttttccattcctaatagtatccagttccttttctagttctgaacgcatttctcgttccctatcaagcgattctctcaattctcggatagtcttcttatcaatttctaataaatctgaaccatcatctgtcccattttgaatatccctgtgttctttgatctcttttgtaagtcggtcgattctttcggttttataaacagaatccctttccaaagtcctaatcttactgagtttatcactaagttctgcattcaattcggtgagttttctcttggcttcttccaactctgttttaaactctccactatttccgcattcttcctcgcatttatctaaccattcaattagtttattaataactagttggtaatcagcgattcctatagccgttcttgtaattgtgggaacataattaggatcttctaatggattgtatggcttgatagcatcatctttatcattattagggggatggacaaccttaattggttggtcctcatctcctccagtagcgtgtggttcttcaataccagtgttagtaataggcttaggcaaatgcttgtcgtacgcgggcacttcctcatccatcaagtatttataatcgggttctacttcagaatattcttttctaagagacgcgacttcgggagttagtagaagaactctgtttctgtatctatcaacgctggaatcaatactcaagttaaggatagcgaatacctcatcgtcatcatccgtatcttctgaaacaccatcatatgacatttcatgaagtctaacgtattgataaatagaatcagatttagtattaaacagatccttaacctttttagtaaacgcatatgtatattttagatctccagatttcataatatgatcacatgccttaaatgtcagtgcttccatgatataatctggaacactaatgggtgacgaaaaagatacagcaccatatgctacgttgataaataaatctgaaccactaagtagataatgattaatgttaagaaagaggaaatattcagtgtataggtatgtcttggcgtcatatcttgtactaaacacgctaaacagtttgttaatgtgatcaatttccaatagattaattagagcagcgggaataccaacaaacatattaccacatccgtattttctatgaatatcacatatcatgttaaaaaatcttgatagaagagcgaatatctcgtctgacttaatgagtcgtagttcagcagcaacataagtcataactgtaaatagaacatactttcctgtagtgttgattctagactccacatcaacaccattattaaaaatagttttatatacatctttaatctgctctccgttaatcgtcgaacgttctagtatacggaaacactttgatttcttatctgtagttaatgacttagtgatatcacgaagaatattacgaattacatttcttgtttttcttgagagacctgattcagaactcaactcatcgttccatagtttttctacctcagtggcgaaatctttggagtgcttggtacatttttcaataaggttcgtgacctccatttattataaaaaatttattcaaaacttaactacaatcgggtaattataaaatcgtagatctcccatgtggcggaatactaccatctatcgcatgtggatggacagtaggtaatggccatgggaacagtaatgtttgcatatttatctttcttgccagtattactgcatattgtcccaatgtttcgatgtgatgttctaacctatcaactgccgctgtatcacaacaatagtgtccgatgaaattaagattatgatccaatgtgtttaatatatgattatcaagtcttatacgatccgcgtcttttttgacaggatcaggttcttctacaggaagaagtttcggcctcttatgatattcatgtctgggaaacggtggtctagggtgaggctccggtatcggagtgggttttggattataatcatcatcgtctatgacatcatcttcgacttcgatatttattttgctatcttgatgatgtcctgtatcagttgcattttcagcactcgactgaatattagcgcattcattgtctattattaccatatttctaaacccaaaatgtatgtgttgaacatcagtactatcgttgatgagtcttatagcatgaattcgcttatcgttatcgggtttatcttctgtcaccttagcaattccttttttattaaactctacataatcatatccatttctattgtttgttctaatataaacgagtatagcatcattgctaaatttttcaatagtatcaaaaacagaatatcctaaaccatataatatatattcaggaacactcaaactaaatgtccaggattctcctaaatacgtaaactttaatagtgcgaaatcattcaaaaatctaccacttatagatagatagtacataaatgcgtatagtagtctacctatctctttattatgaaaaccggcattacgatcatatatgtcgtgatatacctgtgatccgtttacgttaaaccataaatacatgggtgatcctataaacatgaatttatttctaattctcagagctatagttaattgaccgtgtaatatttgcttacatgcatacttgatacgcttattaataagatttttatcattgctcgttatttcagaatcgtatatataaggagtaccatcgtgattcttaccagatattatacaaaatactatatataaaatatattgacccacgttagtaatcatataaatgtttaacgttttaaattttgtattcaatgatccattatcatacgctatcatggtcttgtaatattcattctttaaaatataatattgtgttagccattgcattggagctcctaatggagattttctattctcatccattttaggataggctttcataaagtccctaataacttcgtgaataatgtttctatgttttctactgatgcatgtatttgcttcgatttttttatcccatgtttcatctatcatagatttaaacgcagtaatgctcgcaacattaacatcttgaaccgttggtacaattccgttccataaatttataatgttcgccatttatataactcattttttgaatatacttttaattaacaaaagagttaagttactcatatggacgccgtccagtctgaacatcaatctttttagccagagatatcatagccgctcttagagtttcagcgtgattttccaacctaaatagaacttcatcgttgcgtttacaacacttttctatttgttcaaactttgttgttacattagtaatctttttttccaaattagttagccgttgtttgagagtttcctcattgtcgtcttcatcggctttaacaattgcttcgcgtttagcctctggctttttagcagcctttgtagaaaaaaattcagttgctggaattgcaagatcgtcatctccggggaaaagagttccgtccatttaaagtacagattttagaaactgacactctgcgttatttatatttggtacaacacatggattataaatattgatgttaataacatcagaaaatgtaaagtctatacattgttgcatcgtgttaaattttctaatggatctagtattattgggtccaacttctgcctgaaatccaaatatggaagcggatacaaaaccgtttcctggataaaccacacatctccacttttgctttacatcagaaattgtgtcgttgacatcttgaactctcctatctaatgccggtgttccacctatagattttgaatattcgaatgctgcatgagtagcattaaattccttaatattgccataattttcatatattgagtaaccctggataaaaagtaaacacaccgcagccgtcgctaccacaataaaaaaaattgatagagagttcatttataatctattagaagctgacaaaatttttttacacgcatcagacaatgctttaataaatagttcaacatctacttttgtcatatcgaaccgatggtatgattctaacctagaattacatccgaaaaagttgactatgttcatagtcattaagtcattaacaaacaacattccagactctggattataagacgatactgtttcgtcacaattacctaccttaatcatgtgattatgaatattggctattagagcaccttctaagaaatctataatatctttgaaacacgatttaaaatcaaaccacgaatatacttctacgaagaaagttagtttacccataggagaaataactataaatggagatctaaatacaaaatccggatctatgatagttttaacattattatattctctattaaatacctccacatctaaaaatgttaattttgaaactatgtcttcgtttattaccgtacctgaactaaacgctataagctctattgtttgagaactctttaaacgatattcttgaaatacatgtaacaaagtttcctttaactcggtcggtttatctaccatagttacagaatttgtatccttatctataatataataatcaaaatcgtataaagttatataattatcgcgttcagattgggatcttttcaaatagactaaaaaccccatttctctagtaagtatcttatgtatatgtttgtaaaatatcttcatggtgggaatatgctctaccacagttagccattcctcattgacagcggtagatgtattagacaaaactattccaatgtttaacaagggccattttacgagattattaaatccttgtttgataaatgtagccaatgagggttcgagttcaacgacgattgaattctcttcccgcggatgctgcatgatgaacgacgggatgttgttcgattgatttggaattctttttcgactttttgtttatattaaatattttaaaatttatagcggatagcaattcatgtaccacggataatgtagacgcgtattgcgcatcgatatctttattattagataaatttatcaataaatgtgagaagtttgcctcgttaaggtcttccatttaaatattatataaacatttgtgtttgtaacttattcgtcttttatggaatagttttttactagtaaagctgcaattacacactttgtccgtaaaacataaatataaacaccagcttttatcaatcgttccaaaaagtcgacggcggacatttttaacatggcatctattttaaatacacttaggtttttggaaaaaacatcattttataattgtaacgattcaataactaaagaaaagattaagattaaacataagggaatgtcatttgtattttataagccaaagcattctaccgttgttaaatacttgtctggaggaggtatatatcatgatgatttggttgtattggggaaggtaacaattaataatctaaagatgatgctattttacatggatttatcatatcatggagtgacaagtagtggagcaatttacaaattgggatcgtctatcgatagactttctctaaataggactattgttacaaaagttaataattatgatgatacattttttgacgacgatgattgatcgctattgcacaattttgtttttgtactttctaatatagtgtttaggttctttttcatatgagaatattgatttactaaaatatctatgtttaacttttgttctatgacgtccttatcggcggtatcggtacatatacgtaattcaccttcacaaaatacggagtcttcgataataatagccaatcgattattggatctagctgtctgtatcatattcaacatgtttaatatatcctttcgtttcccctttacaggcatcgatcgtagcatattttccgcgtctgatatggaaatgttaaaactacaaaaatgcgtaatgttagcccgtcctaatattggtacgtgtctataagtttggcatagtagaataatagacgtgtttaaatgccttccaaagtttaagaattctattagagtattgcattttgatagtttatcgcctacatcatcaaaaataagtaaaaagtgtgctgattttttatgattttgtgcgacagcaatacatttttctatgttacttttagttcgtatcagattatattctagagattcctgactactaacgaaattaatatgatttggccaaatgtatccatcataatctgggttataaacgggtgtaaacaagaatatatgtttatattttttaactagtgtagaaaacagagatagtaaatagatagtttttccagatccagatcctcccgttaaaaccattctaaacggcatttttaataaattttctcttgaaaattgtttttcttggaaacaattcataattatatttacagttactaaattaatttgataataaatcaaaatatggaaaactaaggttgttagtagggaggagaacaaagaaggcacatcgtgatataaataacatttattatcatgatgacaccagaaaacgacgaagagcagacatctgtgttctccgctactgtttacggagacaaaattcagggaaagaataaacgcaaacgcgtgattggtctatgtattagaatatctatggttatttcactactatctatgattaccatgtccgcgtttctcatagtgcgcctaaatcaatgcatgtctgctaacgaggctgctattactgacgccgctgttgccgttgctgctgcatcatctactcatagaaaggttgcgtctagcactacacaatatgatcacaaagaaagctgtaatggtttatattaccagggttcttgttatatattacattcagactaccagttattctcggatgctaaagcaaattgcactgcggaatcatcaacactacccaataaatccgatgtcttgactacctggctcattgattatgttgaggatacatggggatctgatggtaatccaattacaaaaactacatccgattatcaagattctgatgtatcacaagaagttagaaagtatttttgtgttaaaacaatgaactaatatttatttttgtacattaataaatgaaatcgcttaatagacaaactgtaagtaggtttaagaagttgtcggtgccggccgctataatgatgatactctcaaccattattagtggcataggaacatttctgcattacaaagaagaactgatgcctagtgcttgcgccaatggatggatacaatacgataaacattgttatttagatactaacattaaaatgtctacagataatgcggtttatcagtgtcgtaaattacgagctagattgcctagacctgatactagacatctgagagtattgtttagtattttttataaagattattgggtaagtttaaaaaagaccaatgataaatggttagatattaataatgataaagatatagatattagtaaattaacaaattttaaacaactaaacagtacgacggatgctgaagcgtgttatatatacaagtctggaaaactggttaaaacagtatgtaaaagtactcaatctgtactatgtgttaaaaaattctacaagtgacaacaaaaaatgaattaataataagtcgttaacgtacgccgccatggacgccgcgtttgttattactccaatgggtgtgttgactataacagatacattgtatgatgatctcgatatctcaatcatggactttataggaccatacattataggtaacataaaaactgtccaaatagatgtacgggatataaaatattccgacatgcaaaaatgctactttagctataagggtaaaatagttcctcaggattctaatgatttggctagattcaacatttatagcatttgtgccgcatacagatcaaaaaataccatcatcatagcatgcgactatgatatcatgttagatatagaagataaacatcagccattttatctattcccatctattgatgtttttaacgctacaatcatagaagcgtataacctgtatacagctggagattatcatctaatcatcaatccttcagataatctgaaaatgaaattgtcgtttaattcttcattctgcatatcagacggcaatggatggatcataattgatgggaaatgcaatagtaattttttatcataaaagttgtaaagtaaataataaaacaataaatattgaactagtagtacgtatattgagcaatcagaaatgatgctggtacctcttatcacggtgaccgtagttgcgggaacaatattagtatgttatatattatatatttgtaggaaaaagatacgtactgtctataatgacaataaaattatcatgacaaaattaaaaaagataaagagttctaattccagcaaatctagtaaatcaactgatagcgaatcagactgggaggatcactgtagtgctatggaacaaaacaatgacgtagataatatttctaggaatgagatattggacgatgatagcttcgctggtagtttaatatgggataacgaatccaatgttatggcgcctagcacagaacacatttacgatagtgttgctggaagcacgctgctaataaataatgatcgtaatgaacagactatttatcagaacactacagtagtaattaatgaaacggagactgttgaagtacttaatgaagataccaaacagaatcctaactattcatccaatcctttcgtaaattataataaaaccagtatttgtagcaagtcaaatccgtttattacagaacttaacaataaatttagtgagaataatccgtttagacgagcacatagcgatgattatcttaataagcaagaacaagatcatgaacacgatgatatagaatcatcggtcgtatcattggtgtgattagtttcctttttataaaattgaagtaatatttagtattattgctgccgtcacgttgtacaaatggagatattccctgtattcggcatttctaaaattagcaattttattgctaataatgactgtagatattatatagatacagaacatcaaaaaattatatctgatgagatcaatagacagatggatgaaacggtacttcttaccaacatcttaagcgtagaagttgtaaatgacaatgagatgtaccatcttattcctcatagattatcgacgattatactctgtattagttctgtcggaggatgtgttatctctatagataatgacatcaatggcaaaaatattctaacctttcccattgatcatgctgtaatcatatccccactgagtaaatgtgtcgtagttagcaagggtcctacaaccatattggttgttaaagcggatatacctagcaaacgattggtaacatcgtttacaaacgacatactatatgtaaacaatctgtcactgattaattatttgccgttgtctgtattcattattagacgagtcaccgactatttggatagacacatatgcgatcagatatttgctaataataagtggtattcccttataaccatcgacgataagcaatatcctattccatcaaactgtataggtatgtcctctgccaagtacataaattctagcatcgagcaagatactttaatccatgtttgtaacctcgagcatccgttcgactcagtatacaaaaaaatgcagtcgtacaattctctacctatcaaggaacaaatattgtacggtagaattgataatataaatatgagcattagtatttctgtggattaatagatttctagtatggggatcattaatcatctctaatctctaaatacctcataaaacgaaaaaaaagctattatcaaatactgtacggaatggattcattctcttctctttttatgaaactctgttgtatatctactgataaaactggaagcaaaaaatctgatagaaagaataagaataagatcaaggattatatggaacacgattattataaaataacaatagttcctggttcctcttccacgtctactagctcgtggtattatacacatgcctagtaatagtctctttgcgttgacggaaagcagactagaaataacaggctaaaatgttcagacaccataatagttcccaacccagataataacagagttccatcaacacattcctttaaactcaatcccaaacccaaaaccgttaaaatgtatccggccaattgatagtagataatgaggtgtacagcgcatgataatttacacagtaaccaaaatgaaaatactttagtaattataagaaatatagacggtaatgtcatcatcaacaatccgataatatgcctgagagtaaacattgacggataaaacaaaaatgctccgcataactctatcatggcaataacacaaccaaatacttgtaagattcctaaattagtagaaaatacaacgaatatcgatgtataagtgatctcgagaaataataagaataaagtaatgcccgtaaagataaacatcaacattgtttggtaatcattaaaccaattagtatgaagttgaactaatttcacagtagattttattccagtgttatcctcgcatgtataagtacctggtaagatatctttatattccataatcaatgagacatcactatctgataacgaatgaagtctagcactagtatgccatttacttaatatggtcgtcttggaagttttattataagttaaaatatcatggttatccaatttccatctaatatactttgtcggattatctatagtacacggaataatgatggtatcattacatgctgtatactctatggtctttgtagttgttataacaaccaacgtatagaggtatatcaacgatattctaactcttgacattttttatttatttaaaatgatacctttgttatttattttattctattttgctaacggtattgaatggcataagtttgaaacgagtgaagaaataatttctacttacttattagacgacgtattatacacgggtgttaatggggcggtatacacattttcaaataataaactaaacaaaactggtttaactaataataattatataacaacatctataaaagtagaggatgcggataaggatacattagtatgcggaaccaataacggaaatcccaaatgttggaaaatagacggttcagacgacccaaaacatagaggtagaggatacgctccttatcaaaatagcaaagtaacgataatcagtcacaacggatgtgtactatctgacataaacatatcaaaagaaggaattaaacgatggagaagatttgacggaccatgtggttatgatttatacacggcggataacgtaattccaaaagatggtttacgaggagcattcgtcgataaagacggtacttatgacaaagtttacattcttttcactgatactatcggctcaaagagaattgtcaaaattccgtatatagcacaaatgtgcctaaacgacgaaggtggtccatcatcattgtctagtcatagatggtcgacgtttctcaaagtcgaattagaatgtgatatcgacggaagaagttatagacaaattattcattctagaactataaaaacagataatgatacgatactatatgtattcttcgatagtccttattccaagtccgcattatgtacctattctatgaataccattaaacaatctttttctacgtcaaaattggaaggatatacaaagcaattgccgtctccagctcctggtatatgtttaccagctggaaaagttgttccacataccacgtttgaagtcatagaacaatataatgtactagatgatattataaagcctttatctaaccaacctatcttcgaaggaccgtctggtgttaaatggttcgatataaaggagaaggaaaatgaacatcgggaatatagaatatacttcataaaagaaaattctatatattcgttcgatacaaaatctaaacaaactcgtagctcgcaagtcgatgcgcgactattttcagtaatggtaactgcgaaaccgttatttatagcagatatagggataggagtaggaatgccacaaatgaaaaaaatacttaaaatgtaatcttaatcgagtacaccacacgacaatgaacaaacataagacagattatgctggttatgcttgctgcgtaatatgcggtctaattgtcggaattatttttacagcgacactattaaaagttgtagaacgtaaattagttcatacaccattaatagataaaacgataaaagatgcatatattagagaagattgtcctactgactggataagctataataataaatgtatccatttatctactgatcgaaaaacctgggaggaaggacgtaatgcatgcaaagctctaaattcaaattcggatctaattaagatagagactccaaacgagttaagttttttaagaagccttagacgaggctattgggtaggagaatccgaaatattaaaccagacaaccccatataattttatagctaagaatgccacgaagaatggaactaaaaaacggaaatatatttgtagcacaacgaatactcccaaactgcattcgtgttacactatataacaattacactacatttttatcataccactacttcggttagatgttttagaaaaaaataaatatcgccgtaccgttcttgtttttataaaaataacaattaacaattatcaaattttttctttaatattttacgtggttgaccattcttggtggtaaaataatctcttagtgttggaatggaatgctgtttaatgtttccacactcatcgtatattttgacgtatgtagtcacatcgtttacgcaatagtcagactgtagttctatcatgcttcctacatcagaaggaggaacagttttaaagtctcttggttttaatctattaccgttagttttcatgaaatcctttgttttatccacttcacattttaaataaatgtccactatacattcttttgttaattttactagatcgtcatgggtcatagaatttataggttccgtagtccatggatccaaactagcaaacttcgcgtatacggtatcgcgattagtgtatacaccaactgtatgaaaattaagaaaacagtttaataaatcaacagaaatatttaatcctccgtttgatacagatgcgccatatttatggatttcggattcacacgttgtttgtctgaggtgttcgtctagtgttgcttctacgtaaacttcgattcccatatattctttattgtcagaatcgcataccgatttatcatcatacactgtttgaaaactaaatggtatacacatcaaaataataaataataacgagtacattctgcaatattgttatcgtaattggaaaaatagtgttcgagtgagttggattatgtgagtattggattgtatattttattttatattttgtaataagaataaaatgctaatgtcaagtttattccaatagatgtcttattaaaaacatatataataaataacaatggctgaatggcataaaattatcgaggatatctcaaaaaataataagttcgaggatgccgccatcgttgattacaagactacaaagaatgttctagctgctattcctaacagaacatttgccaagattaatccgggtgaaattattcctctcatcactaatcgtaatattctaaaacctcttattggtcagaaatattgtattgtatatactaactctctaatggatgagaacacgtatgctatggagttgcttactgggtacgcccctgtatctccgatcgttatagcgagaactcataccgcacttatatttttgatgggtaagccaacaacatccagacgtgacgtgtatagaacgtgtagagatcacgctacccgtgtacgtgcaactggtaattaaaataaaaagtaatattcatatgtagtgtcaattttaaatgatgatgatgaaatggataatatccatattgacgatgtcaataatgccggtattggcatacagttcatcgatttttagatttcattcagaggatgtggaattatgttatgggcatttgtattttgataggatctataatgtagtaaatataaaatataatccgcatattccatatagatataattttattaatcgcacgttaaccgtagatgaactagacgataatgtcttttttacacatggttattttttaaaacacaaatatggttcacttaatcctagtttgattgtctcattatcaggaaacttaaaatataatgatatacaatgctcagtaaatgtatcgtgtctcattaaaaatttggcaacgagtacatctactatattaacatctaaacataagacttattctctacatcggtccacgtgtattactataataggatacgattctattatatggtataaagatataaatgacaagtataatgacatctatgattttactgcaatatgtatgctaatagcgtctacattgatagtgaccatatacgtgtttaaaaaaataaaaatgaactcttaattatgctatgctattagaaatggataaaatcaaaattacggttgattcaaaaattggtaatgttgttaccatatcgtataacttggaaaagataactattgatgtcacacctaaaaagaaaaaagaaaaggatgtattattagcgcaatcagttgctgtcgaagaggcaaaagatgtcaaggtagaagaaaaaaatattatcgatattgaagatgacgatgatatggatgtagaaagcgcgtaatactatctataaaaataagtatataataaatactttttatttacggtactcttgtagtggtgataccctactcgattatttttttaaaaaaatacttattctgattcttctaaccatttccgtgttcgtttgaatgccacatcgacgtcaaagataggggagtagttgaaatctagttctgcattgttggtacgcacctcaaatgtagtgttggatatcttcaacgtatagttgttgagtagtgatggttttctaaatagaattctcttcatatcattcttgcacgcgtacatttttagcatccatcttggaattctagatccttgttctattcccaatggtttcatcaatagaagattaaacatatcgtacgaacacgatggagagtaatcgtagcaaaagtaagcatttcctttaatctcagatcccggatactggatatattttgcagccaacacgtgcatccatgcaacatttcctacatatacccggctatgcaccgcgtcatcatcgactgtacgatacataatgttaccgtgttgcttacattgctcgtaaaagactttcgtcaatttgtctccttctccgtaaattctagtgggtcttaggcaacaagtatacaattttgctccattcatgattacggaattattggctttcataaccagttgctcggccatacgtttactttttgcgtatacatgtcctggtgatatatcataaagggtatgctcatggccgatgaatggatcaccgtgtttattgggtcctattgcttccatgctactagtatagatcaaatacttgattcctaggtccacacaagctgccaaaatagtctgtgttccataatagtttactttcatgatttcattatcggtgtattttccaaatacatccactagagcagccgtatgaataatcagatttaccccatctagcgcttctctcaccttatcaaagtcgtttatatcacattgtatatagtttataaccttaactttcgaggttattggttgtggatcttctacaatatctatgactctgatttcttgaacatcatctgcactaattaacagttttactatatacctgcctagaaatccggcaccaccagtaaccgcgtacacggccattgctgccactcataatatcagactacttattctattttactaaataatggctgtttgtataatagaccacgataatatcagaggagttatttactttgaaccagtccatggaaaagataaagttttaggatcagttattggattaaaatccggaacgtatagtttgataattcatcgttacggagatattagtcaaggatgtgattccataggcagtccagaaatatttatcggtaacatctttgtaaacagatatggtgtagcatatgtttatttagatacagatgtaaatatatctacaattattggaaaggcgttatctatttcaaaaaatgatcagagattagcgtgtggagttattggtatttcttacataaatgaaaagataatacattttcttacaattaacgagaatggcgtttgatatatcagttaatgcgtctaaaacaataaatgcattagtttacttttctactcagcaaaataaattagtcatacgtaatgaagttaatgatacacactacactgtcgaatttgatagggacaaagtagttgacacgtttatttcatataatagacataatgacaccatagaaataagaggggtgcttccagaggaaactaatattggttgcgcggttaatacgccggttagtatgacttacttgtataataagtatagttttaaactgattttagcagaatatataagacacagaaatactatatccggcaatatttattcggcattgatgacactagatgatttggctattaaacagtatggagacattgatctattatttaatgagaaacttaaagtagactccgattcgggactatttgactttgtcaactttgtaaaggatatgatatgttgtgattctagaatagtagtagctctatctagtctagtatctaaacattgggaattgacaaataaaaagtataggtgtatggcattagccgaacatatatctgatagtattccaatatctgagctatctagactacgatacaatctatgtaagtatctacgcggacacactgagagcatagaggatgaatttgattattttgaagacgatgattcgtctacatgttctgccgtaaccgacagggaaacggatgtataattttttttatagcgtgaaggatatgataaaaaatataattgttgtatttatcccattctaatcaccttatatgattctgtaacacaataaaggagtctcatagatgtatagaggtcagatactggtttgataaactgtttattccacataagtatgtttgactttatggttagacccgcatactttaacaaatcactgaaaattggagttaggtattgacctctcagaatcagttgccgttctggaacattaaatgtattttttatgatatactccaacgcatttatgtgggcatacaacaagtcattactaatggagtattccaagagttttagttgtctagtatttaacaagagaagagatttcaacagactgtttatgaactcgaatgccgcctcattgtcgcttatattgatgatgtcgaattctcccaatatcatcaccgatgagtagctcatcttgttatcgggatccaagttttctaaagatgtcattaaaccctcgatcatgaatggatttatcatcatcgtttttatgttggacatgagcttagtccgtttgtccacatctatagacgacgatttctgaattatttcatatatccctctctttaactccaggaacttgtcaggatggtctactttaatatgttctcgtctaagagatgaaaatctttggatggtcgcacgcgacttttctctaaaggatgatgttgcccaagatcctctcttaaatgaatccatcttatccttggacaagatggacagtctattttccttagatggtttaatatttttgttacccatgatctataaaggtagacctaatcgtctcggatgacctatatatttattttcagttttattatacgcataaattgtaaaaaatatgttaggtttacaaaaatgtctcgtggggcattaatcgtttttgaaggattggacaaatctggaaaaacaacacaatgtatgaacatcatggaatctataccggcaaacacgataaaatatcttaactttcctcagagatccactgtcactggaaagatgatagatgactatctaactcgtaaaaaaacctataatgatcatatagttaatctattattttgtgcaaatagatgggagtttgcatcttttatacaagaacaactagaacagggaattactttaatagttgatagatacgcattttctggagtagcgtatgccgccgctaaaggcgcgtcaatgactctcagtaagagttatgaatctggattgcctaaacccgacttagttatattcttggaatctggtagcaaagaaattaatagaaacgtcggcgaggaaatttatgaagatgttacattccaacaaaaggtattacaagaatataaaaaaatgattgaagaaggagatattcattggcaaattatttcttctgaattcgaggaagatgtaaagaaggagttgattaagaatatagttatagaggctatacacacggttactggaccagtggggcaactgtggatgtaatagtgaaattacattttttataaatagatgttagtacagtgttataaatggatgaagcatattactctggcaacttggaatcagtactcggatacgtgtccgatatgcataccgaactcgcatcaatatctcaattagttattgccaagatagaaactatagataatgatatattaaacaaggacattgtaaattttatcatgtgtagatcaaacttggataatccatttatctctttcctagatactgtatatactattatagatcaagagaactatcagactgagttgattaattcattagacgacaatgaaattatcgattgtatagttaataagtttatgagcttttataaggataacctagaaaatatagtagatgctatcattactctaaaatatataatgaataatccagattttaaaactacgtatgcagaagtactcggttccagaatagccgatatagatattaaacaagtgatacgtaagaatatactacaattgtctaatgatatccgcgaacgatatttgtgaaaaatattaaaaaaaaatactttttttattaaatgacgtcgcttcgcgaatttagaaaattatgctgtgatatatatcacgcatcaggatataaagaaaaatctaaattaattagagactttataacagatagggatgataaatatttgatcattaagctattgcttcccggattagacgatagaatttataacatgaacgataaacaaattataaaattatatagtataatatttaaacaatctcaggaagatatgctacaagatttaggatacggatatataggagacactattaggactttcttcaaagagaacacagaaatccgtccacgagataaaagcattttaactttagaagacgtggatagtttcttaactacgttatcatccgtaactaaagaatcgcatcaaataaaattattgactgatattgcatccgtttgtacatgtaatgatttaaaatgtgtagtcatgcttattgataaagatctaaaaattaaagcgggtcctcggtacgtacttaacgctattagtcctcatgcctatgatgtgtttagaaaatctaataacttgaaagagataatagaaaattcatctaaacaaaatctagactctatatctatttctgttatgactccaattaatcccatgttagcggaatcgtgtgattctgtcaataaggcgtttaaaaaatttccatcaggaatgtttgcggaagtcaaatacgatggtgaaagagtacaagttcataaaaataataacgagtttgccttctttagtagaaacatgaaaccagtactctctcataaagtggattatctcaaagaatacataccgaaagcatttaaaaaagctacgtctatcgtattggattctgaaattgttcttgtagacgaacataatgtaccgctcccgtttggaagtttaggtatacacaaaaagaaagaatataaaaactctaacatgtgtttgttcgtgtttgactgtttgtactttgatggattcgatatgacggacattccattgtacgaacgaagatcttttctcaaagatgttatggttgaaatacccaatagaatagtattctcagagttgacgaatattagtaacgagtctcagttaactgacgtattggatgatgcactaacgagaaaattagaaggattggtcttaaaagatattaatggagtatacgaaccgggaaagagaagatggttaaaaataaagcgagactatttgaacgagggttccatggcagattctgccgatttagtagtactaggtgcctactatggtaaaggagcaaagggtggtatcatggcagtctttctaatgggttgttacgacgatgaatccggtaaatggaagacggttaccaagtgttcaggacacgatgataatacgttaagggagttgcaagaccaattaaagatgattaaaattaacaaggatcccaaaaaaattccagagtggttagtagttaataaaatctatattcccgattttgtagtagaggatccgaaacaatctcagatatgggaaatttcaggagcagagtttacatcttccaagtcccataccgcaaatggaatatccattagatttcctagatttactaggataagagaggataaaacgtggaaagaatctactcatctaaacgatttagtaaacttgactaaatcttaatagttacatacaaactgaaaattaaaataacactatttagttggtggtcgccatggatggtgttattgtatactgtctaaacgcgctagtaaaacatggcgaggaaataaatcatataaaaaatgatttcatgattaaaccatgttgtgaaagagtttgtgaaaaagtcaagaacgttcacatcggcggacaatctaaaaacaatacagtgattgcagatttgccatatctggataatgctgtatcggatgtatgcaattcactgtataaaaagaatgtatcaagaatatccagatttgctaatttgataaagatagatgacgatgacaagactcctactggtgtatataattattttaaacctaaagatgccattcctgttatcatatctataggaaaggataaagatgtctgtgaactattaatctcatcagacatatcgtgtgcatgcgtggagttaaattcatatcacgtagccattcttcccatggatgtttccttttttaccaaaggaaatgcatcattgattattctcctgtttgatttctctatcgatgcggcacctctcttaagaagtgtaaccgataataatgttattatatctagacaccagcgtctacatgacgagcttccgagttccaattggttcaagttttacataagtataaagtccgactattgttctatattatatatggttgttgatggatctgtgatgcatgcgatagctgataatagaactcacgcaattattagcaaaaatatattagacaatactacgattaacgatgagtgtagatgctgttattttgaaccacagattaggattcttgatagagatgagatgctcaatggatcatcgtgtgatatgaacagacattgtattatgatgaatttacctgatgtaggcgaatttggatctagtatgttggggaaatatgaacctgacatgattaagattgctctttcggtggctggtaatttaataagaaatcgagactacattcccgggagacgaggatatagctactacgtttacggtatagcctctagataatttttttaagcacgaaataaaaaacataattttaaaccaatctatttcatactattttgtgtgatcaccatggacataaagatagatattagtatttctggtgataaatttacggtgactactaggagggaaaatgaagaaagaaaaaaatatctacctctccaaaaagaaaaaactactgatgttatcaaacctgattatcttgagtacgatgacttgttagatagagatgagatgtttactattctagaggaatattttatgtacagaggtctattaggcctcagaataaaatatggacgactctttaacgaaattaaaaaattcgacaatgatgcggaagaacaattcggtactatagaagaactcaagcagaaacttagattaaattctgaagagggagcagataactttatagattatataaaggtacaaaaacaggatatcgtcaaacttactgtatacgattgcatatctatgataggattgtgtgcatgcgtggtagatgtttggagaaatgagaaactgttttctagatggaaatattgtttacgagcgattaaactgtttattaatgatcacatgcttgataagataaaatctatactgcagaatagactagtatatgtggaaatgtcatagaaagttaaaagttaatgagagcaaaaatatataaggttgtattccatatttgttatttttttctgtaatagttagaaaaatacattcgatggtctatctatcagattattatgtgttataaggtactttttctcataataaactagagtatgagtaagatagtgtttttcaaaacatataaatctaaaattgatggatgagatatacagctattaatttcgaaaatatattttaatctgataactttaaacatggatttttaatggtggtttaacgttttaaaaaaagattttgttattgtagtatatgataatattaaaagatggatataaagaatttgctgactgcatgtactattttttacattactacattggctacggcagatatacctacttcgtcactgccacacgctccggtaaacggggcatgtgacgagggagaatatcttgataagaggcataatcaatgttgtaatcagtgtccacctggagaatttgccaaggtcagatgtaatggtaacgataacacaaaatgtgaacgctgcccacctcatacatataccgcaatccccaattactctaatggatgtcatcaatgtagaaaatgcccaacaggatcatttgataaggtaaagtgtaccggaacacagaacagtaaatgttcgtgtcttcctggttggtattgcgctactgattcttcacagactgaagattgtcgagattgtataccaaaaaggagatgtccatgcggatactttggtggaatagatgaacaaggaaatcctatttgtaaatcgtgttgtgttggtgaatattgcgactacctacgtaattatagacttgatccatttcctccatgcaaactatctaaatgtaattaattatgattttgatgataatgttaccatacattatatcgctacttggttagtgtattattcagtatgaagacctattaataattacttatcttttgacgatcttgttataattataatataaaaatacttatggcatagtaactcataattgctgacgcgataaattcgtaataatctgttttgttcaaatttttataaggaatctacaggcataaaaataaaaatataatttataatatactcttacagcgcgccatcatgaataacagcagtgaattgattgctgttattaatggatttagaaatagtggacgattttgtgatattaatatagttattaatgatgaaaggataaacgctcataaactcatcctatctggagcctccgaatatttttccattctgttttccaataattttatcgattctaatgaatacgaagttaatctaagtcatttagattatcaaagcgtaaacgatttgatcgattacatttatgggatacctttgagcctaactaacgataacgtgaaatatattctttcaaccgctgattttttacaaattggatctgctattacggagtgtgaaaattacatacttaaaaatctttgttctagaaactgtatcgatttctacatatacgctgataaatataataacaagaaaatagaatcagcgtcgtttaacacaatattacaaaatattttgagactcatcaacgatgaaaactttaaatacttaacagaggaatcaatgataaaaattttaagcgatgatatgttaaatataaaaaatgaggatttcgccccactaattctcattaaatggttagagagtactcaacaaccatgcaccgtcgagttacttaaatgcctcagaatatcattgctttccccacaagttataaaatcactttatagtcatcgactggttagttcaatctacgaatgtataacattcttaaacaatatagcattcttggatgaatcatttcctagataccatagcatcgagttgatatctatcggtataagtaattcgcatgataagatttccataaactgctacaatcataaaaaaaatacatgggaaatgatatcttcacgtagatataggtgtagtttcgcagtggccgtcctggataatattatttatatgatgggtggatatgatcagtccccgtatagaagttcaaaggttatagcgtacaatacatgtacaaattcttggatatatgatataccagagctaaaatatcctcgttctaattgtgggggactggctgatgacgaatacatttattgtataggcggcatacgcgatcaggattcatcgttgacatctagtattgatagatggaagccatcaaaaccatattggcagaagtatgctaaaatgcgcgaaccaaaatgtgatatgggggttgcgatgttaaacggattaatatatgttataggtggaatcgttaaaggtgacacgtgtaccgacgcactagagagtttatcagaagatggatggatgaagcatcaacgtcttccaataaaaatgtccaatatgtcgacgattgttcatgatggcaagatttatatatctggaggttacaacaatagtagtgtagttaatgtaatatcgaatttagtccttagctataattcgatatatgatgaatggaccaaattatcatcattaaacattcctagaattaatcccgctctatggtcagcgcataataaattatatgtaggaggaggaatatctgatgatgttcgaactaatacatctgaaacatacgacaaagaaaaagattgttggacattggataatggtcacgtgttaccacgcaattatataatgtataaatgcgaaccgattaaacataaatatccattggaaaaaacacagtacacgaatgattttctaaagtatttggaaagttttataggtagttgatagaacaaaatacataattttgtaaaaataaatcactttttatactaatatgacacgattaccaatacttttgttactaatatcattagtatacgctacaccttttcctcagacatctaaaaaaataggtgatgatgcaactctatcatgtaatcgaaataatacaaatgactacgttgttatgagtgcttggtataaggagcccaattccattattcttttagctgctaaaagcgacgtcttgtattttgataattataccaaggataaaatatcttacgactctccatacgatgatctagttacaactatcacaattaaatcattgactgctagagatgccggtacttatgtatgtgcattctttatgacatcgcctacaaatgacactgataaagtagattatgaagaatactccacagagttgattgtaaatacagatagtgaatcgactatagacataatactatctggatctacacattcaccggaaactagttctgagaaacctgattatatagataattctaattgctcgtcggtattcgaaatcgcgactccggaaccaattactgataatgtagaagatcatacagacaccgtcacatacactagtgatagcattaatacagtaagtgcatcatctggagaatccacaacagacgagactccggaaccaattactgataaagaagatcatacagtcacagacactgtctcatacactacagtaagtacatcatctggaattgtcactactaaatcaaccaccgatgatacgtacaatgataatgatacagtaccaccaactactgtaggcggtagtacaacctctattagcaattataaaaccaaggactttgtagaaatatttggtattaccgcattaattatattgtcggccgtggcaatattctgtattacgtattatatatgtaataaacgttcacgtaaatacaaaacagagaacaaagtctagatttttgacttacataaatgtctgggatagtaaaatctatcatattgagcgggccatctggtttaggaaagacagccatagccaaaagactatgggaatatatttggatttgtggtgtcccataccactagatttcctcgtcctatggaacgagaaggtgtcgattaccattacgttaacagagaggccatctggaagggaatagccgccggaaactttctagaacatactgagtttttaggaaatatttacggaacttctaaaactgctgtgaatacagcggctattaataatcgtatttgtgtgatggatctaaacatcgatggcgttagaagtcttaaaaatacgtacctaatgccttactcggtgtatataagacctacctctcttaaaatggttgagaccaagcttcgttgtagaaacactgaagcggatgatgagattcatcgtcgtgtgatgttggcaaaaactgacatggatgaggcaggtgaagccggtctattcgacactattatcattgaagatgatgtgaatttagcatatagtaagttaattcagatactacaggaccgtattagaatgtattttaacactaattagagacttaagacttaaaacttgataattaataatataactcgtttttatatgtggctatttcaacgtctaatgtattagttaaatattaaaacttaccacgtaaaacttaaaatttaaaatgatatttcattgacagatagatcacacattatgaactttcaaggacttgtgttaactgacaattgcaaaaatcaatgggtcgttggaccattaataggaaaaggtggatttggtagtatttatactactaatgacaataattatgtagtaaaaatagagcccaaagctaacggatcattatttaccgaacaggcattttatactagagtacttaaaccatccgttatcgaagaatggaaaaaatctcacaatataaagcacgtaggtcttatcacgtgcaaggcatttggtctatacaaatccattaatgtggaatatcgattcttggtaattaatagattaggtgcagatctagatgcggtgatcagagccaataataatagactaccaaaaaggtcggtgatgttgatcggaatcgaaatcttaaataccatacaatttatgcacgagcaaggatattctcacggagatattaaagcgagtaatatagtcttagatcaaatagataagaataaattatatctagtggattacggattggtttctaaattcatgtctaatggcgaacatgttccatttataagaaatccaaataaaatggataacggtactctagaatttacacctatagattcgcataaaggatacgttgtatctagacgtggagatctagaaacacttggatattgtatgattagatggttgggaggtatcttaccatggactaagatatctgaaacaaagaattgtgcattagtaagtgccacaaaacagaaatatgttaacaatactgcgactttgttaatgaccagtttgcaatatgcacctagagaattgctgcaatatattaccatggtaaactctttgacatattttgaggaacccaattacgacaagtttcggcacatattaatgcagggtgtatattattaagtgtggtgtttggtcgataaaaattaaaaaataacttaatttattattgatctcgtgtgtacaaccgaaatcatggcgatgttttacgcacacgctctcggtgggtacgacgagaatcttcatgcctttcctggaatatcatcgactgttgccaatgatgtcaggaaatattctgttgtgtcagtttataataacaagtatgacattgtaaaagacaaatatatgtggtgttacagtcaggtgaacaagagatatattggagcactgctgcctatgtttgagtgcaatgaatatctacaaattggagatccgatccatgatcaagaaggaaatcaaatctctatcatcacatatcgccacaaaaactactatgctctaagcggaatcgggtacgagagtctagacttgtgtttggaaggagtagggattcatcatcacgtacttgaaacaggaaacgctgtatatggaaaagttcaacatgattattctactatcaaagagaaggccaaagaaatgagtacacttagtccaggacctatcatcgattaccacgtctggataggagattgtatctgtcaagttactgctgtggacgtacatggaaaggaaattatgagaatgagattcaaaaagggtgcggtgcttccgatcccaaatctggtaaaagttaaacttggggagaatgatacagaaaatctttcttctactatatcggcggcaccatcgaggtaaccacctctctggaagacagcgtgaataatgtactcatgaaacgtttggaaactatacgccatatgtggtctgttgtatatgatcattttgatattgtgaatggtaaagaatgctgttatgtgcatacgcatttgtctaatcaaaatcctataccgagtactgtaaaaacaaatttgtacatgaagactatgggatcatgcattccatggaagctctagagtatcttagcgaactgaaggaatcaggtggatggagtcccagaccagaaatgcaggaatttgaatatccagatggagtggaagacactgaatcaattgagagattggtagaggagttcttcaatagatcagaacttcaggctggtaattctattaattgttaaacatacatctgtttcagctaagcaactaagaacacgtatacggcagcagcttccttctatactctcatcttttaccaacacaaagggtggatatttgttcattggagttgataataatacacacaaagtatttggattcacggtgggttacgactacctcagactgatagagaatgatatagaaaagcatatcaaaagactttgtgttgtgtatttctgtgagaagaaagaggacatcaagtacgcgtgtcgattcatcaaggtatataaacctggggatgaggctacctcgacatacgtgtgcgctatcaaagtggaaagatgctgttgtgctgtgtttgcagattggccagaatcatggtatatggatactaatggtatcaagaagtattctccagatgaatgggtgtcacatataaaattttaattaatgtaactatagagaacaaataataaggttgtaatatcatatagacaataactaacaattaattagtaactgttatctcttttttaattaaccaactaactatatacctattaatacatcgtaattatagttcttaacatctattaatcattaattcgcttctttaattttttataaactaacattgttaattgaaaagggataacatgttacagaatataaattatatatggatttttttaaaaaggaaatacttgactggagtatatatttatctcttcattatatagcacgcgtgttttccaatttttccacatcccatataatacaggattataatctcgttcgaacatacgagaaagtggataaaacaatagttgattttttatctaggttgccaaatttattccatattttagaatatggggaaaatattctacatatttattctatggatgatgctaatacgaatattataattttttttctagatagagtattaaatattaataagaacgggtcatttatacacaatctcgggttatcatcatccattaatataaaagaatatgtatatcaattagttaataatgatcatccagataataggataagactaatgcttgaaaatggacgtagaacaagacattttttgtcctatatatcagatacagttaatatctatatatgtattttaataaatcatggattttatatagatgccgaagacagttacggttgtacattattacatagatgtatatatcactataagaaatcagaatcagaatcatacaatgaattaattaagatattgttaaataatggatcagatgtagataaaaaagatacgtacggaaacacaccttttatcctattatgtaaacacgatatcaacaacgtggaattgtttgagatatgtttagagaatgctaatatagactctgtagactttaatagatatacacctcttcattatgtctcatgtcgtaataaatatgattttgtaaagttattaatttctaaaggagcaaatgttaatgcgcgtaataaattcggaactactccattttattgtggaattatacacggtatctcgcttataaaactatatttggaatcagacacagagttagaaatagataatgaacatatagttcgtcatttaataatttttgatgctgttgaatctttagattatctattatccagaggagttattgatattaactatcgtactatatacaacgaaacatctatttacgacgctgtcagttataatgcgtataatacgttggtctatctattaaacaaaaatggtgattttgagacgattactactagtggatgtacatgtatttcggaagcagtcgcaaacaacaacaaaataataatggaagtactattgtctaaacgaccatctttgaaaattatgatacagtctatgatagcaattactaaacataaacagcataatgcagatttattgaaaatgtgtataaaatatactgcgtgtatgaccgattatgatactcttatagatgtacagtcgctacagcaatataaatggtatattttaagatgtttcgatgaaatagatatcatgaagagatgttatataaaaaataaaactgtattccaattagttttttgtatcaaagacattaatactttaatgagatacggtaaacatccttctttcgtgaaatgcactagtctcgacgtatacggaagtcgtgtacgtaatatcatagcatctattagatatcgtcagagattaattagtctattatccaagaagctggatcctggagataaatggtcgtgttttcctaacgaaataaaatataaaatattggaaaactttaacgataacgaactatccacatatctaaaaatcttataaacattattaaaatataaaatctaagtaggataaaatcacactacatcattgtttccttttagtgctcgacagtgtatactatttttaacgctcataaataaaaatgaaaacgatttccgttgttacgttgttatgcgtactacctgctgttgtttattcaacatgtactgtacccactatgaataacgctaaattaacgtctaccgaaacatcgtttaatgataaccagaaagttacgtttacatgtgatcagggatatcattctttggatccaaatgctgtctgtgaaacagataaatggaaatacgaaaatccatgcaaaaaaatgtgcacagtttctgattatgtctctgaactatataataaaccgctatacgaagtgaattccaccatgacactaagttgcaacggcgaaacaaaatattttcgttgcgaagaaaaaaatggaaatacttcttggaatgatactgttacgtgtcctaatgcggaatgtcaacctcttcaattagaacacggatcgtgtcaaccagttaaagaaaaatactcatttggggaatatatgactatcaactgtgatgttggatatgaggttattggtgcttcgtacataagttgtacagctaattcttggaatgttattccatcatgtcaacaaaaatgtgatatgccgtctctatctaacggattaatttccggatctacattttctatcggtggcgttatacatcttagttgtaaaagtggttttacactaacggggtctccatcatccacatgtatcgacggtaaatggaatcccatactcccaatatgtgtacgaactaacgaaaaatttgatccagtggatgatggtcccgacgatgagacagatttgagcaaactctcgaaagacgttgtacaatatgaacaagaaatagaatcgttagaagcaacttatcatataatcatagtggcgttgacaattatgggcgtcatatttttaatctccgttatagtattagtttgttcctgtgacaaaaataatgaccaatataagttccataaattgctaccgtaaatataaatccgttaaaataattaataatttaataacaaacaagtatcaaaagattaaagacttatagctagaatcaattgagatgtcttcttcagtggatgttgatatctacgatgccgttagagcatttttactcaggcactattataacaagagatttattgtgtatggaagaagtaacgccatattacataatatatacaggctatttacaagatgcgccgttataccgttcgatgatatagtacgtactatgccaaatgaatcacgtgttaaacaatgggtgatggatacacttaatggtataatgatgaatgaacgcgatgtttctgtaagcgttggcaccggaatactattcatggaaatgtttttcgattacaataaaaatagtatcaacaatcaactaatgtatgatataattaatagcgtatctataattctagctaatgagagatatagaagcgcttttaacgacgatggtatatacatccgtagaaatatgattaacaagttgtacggatacgcatctctaactactattggcacgatcgctggaggtgtttgttattatctgttgatgcatctagttagtttgtataaataattatttcaatatactagttaaaattttaagattttaaatgtataaaaaactaataacgtttttatttgtaataggtgcattagcatcctattcgaataatgagtacactccgtttaataaactgagtgtaaaactctatatagatggagtagataatatagaaaattcatatactgatgataataatgaattggtgttaaattttaaagagtacacaatttctattattacagagtcatgcgacgtcggatttgattccatagatatagatgttataaacgactataaaattattgatatgtataccattgactcgtctactattcaacgcagaggtcacacgtgtagaatatctaccaaattatcatgccattatgataagtacccttatattcacaaatatgatggtgatgagcgacaatattctattactgcagagggaaaatgctataaaggaataaaatatgaaataagtatgatcaacgatgatactctattgagaaaacatactcttaaaattggatctacttatatatttgatcgtcatggacatagtaatacatattattcaaaatatgatttttaaaaatttaaaatatattatcacttcagtgacagtagtcaaataacaaacaacaccatgagatatattataattctcgcagttttgttcattaatagtatacatgctaaaataactagttataagtttgaatccgtcaattttgattccaaaattgaatggactggggatggtctatacaatatatcccttaaaaattatggcatcaagacgtggcaaacaatgtatacaaatgtaccagaaggaacatacgacatatccgcatttccaaagaatgatttcgtatctttctgggttaaatttgaacaaggcgattataaagtggaagagtattgtacgggactatgcgtcgaagtaaaaattggaccaccgactgtaacattgactgaatacgacgaccatatcaatttgtacatcgagcatccgtatgctactagaggtagcaaaaagattcctatttacaaacgcggtgacatgtgtgatatctacttgttgtatacggctaacttcacattcggagattctaaagaaccagtaccatatgatatcgatgactacgattgcacgtctacaggttgcagcatagactttgtcacaacagaaaaagtgtgcgtgacagcacagggagccacagaagggtttctcgaaaaaattactccatggagttcgaaagtatgtctgacacctaaaaagagtgtatatacatgcgcaattagatccaaagaagatgttcccaatttcaaggacaaaatggccagagttatcaagagaaaatttaatacacagtctcaatcttatttaactaaatttctcggtagcacatcaaatgatgttaccacttttcttagcatgcttaacttgactaaatattcataactaatttttattaatgatacaaaaacgaaataaaactgcatattatacactggttaacgcccttataggctctaaccattttcaagatgaggtccctgattatagtccttctgttcccctctatcatctactccatgtctattagacgatgtgagaagactgaagaggaaacatggggattgaaaatagggttgtgtataattgccaaagatttctatcccgaaagaactgattgcagtgttcatctcccaactgcaagtgaaggattgataactgaaggcaatggattcagggatatacgaaacaccgataaattataaaaaaagcaatgtgtccgctgtttccgttaataatactattttcgtaactggcggattattcataaataactctaatagcacgatcgtggttaacaatatggaaaaacttgacatttataaagacaaacaatggtcgattatagaaatgcctatggctagggtatatcacggcattgactcgacatttggaatgttatattttgccggaggtctatccgttaccgaacaatatggtaatttagagaaaaacaacgagatatcttgttacaatcctagaacgaataagtggtttgatatttcatatactatttataagatatccatatcatcattgtgtaaactaaataacgtcttctatgtatttagtaaggacattggatatgtggaaaagtatgatggtgcatggaagttagtacatgatcgtctccccgctataaaggcattatcaacttctccttattgattgaaaatgaaaatataaatagtttttatgtatagcagtattaccctatagttttattgcttactactaacatggatacagatgttacaaatgtagaagatatcataaatgaaatagatagagagaaagaagaaatactaaaaaatgtagaaattgaaaataataaaaacattaacaagaatcatccaagtggatatattagagaagcactcgttattaataccagtagtaatagtgattccattgataaagaagttatagaatgtatcagtcacgatgtaggaatatagatcatatctactaatttttataatcgatacaaaacataaaaaacaactcgttattacatagcaggcatggaatccttcaagtattgttttgataacgatggcaagaaatggattatcggaaatactttatattctggtaattcaatactatataaggtcagaaaaaatttcactagttcgttctacaattacgtaatgaagatagatcacaaatcacacaagccattgttgtctgaaatacgattctatatatctgtattggatcctttgactatcgacaactggacacgggaacgtggtataaagtatttggctattccagatctgtatggaattggagaaaccgatgattatatgttcttcgttataaaaaattcgggaagagtattcgccccaaaggatactgaatcagtcttcgaagcatgcgtcactatgataaacacgttagagtttatacactctcgaggatttacccatggaaaaatagaaccgaggaatatactgattagaaataaacgtctttcactaattgactattctagaactaacaaactatacaagagtggaaactcacatatagattacaacgaggacatgataacttcaggaaatatcaattatatgtgtgtagacaatcatcttggagcaacagtttcaagacgaggagatttagaaatgttgggatattgcatgatagaatggttcggtggcaaacttccatggaaaaacgaaagtagtataaaagtaataaaacaaaaaaaagaatataaaaaatttatagctactttctttgaggactgttttcctgaaggaaatgaacctctggaattagttagatatatagaattagtatacacgttagattattctcaaactcctaattatgacagactacgtaaactgtttatacaagattgaaattatattcttttttttatagagtgtggtagtgttacggatatctaatattaatattagactatctctatcgcgctacacgaccaatatcgattactatggatatcttctatgaaaggagagaatgtatttatttctccagcgtcaatctcgtcagtattgacaatactgtattatggagctaatggatccactgctgaacagctatcaaaatatgtagaaacggaggagaacacggataaggttagcgctcagaatatctcattcaaatccatgaataaagtatatgggcgatattctgccgtgtttaaagattcctttttgagaaaaattggcgataagtttcaaactgttgacttcactgattgtcgcactatagatgcaatcaacaagtgtgtagatatctttactgaggggaaaatcaatccactattggatgaaccattgtctcctagcaattagtgccgtatactttaaagcaaaatggttgacgccattcgaaaaggaatttaccagtgattatcccttttacgtatctccgacggaaatggtagacgtaagtatgatgtctatgtacggcaaggcatttaatcacgcatctgtaaaagaatcattcggcaacttttcaatcatagaactgccatatgttggagatactagtatgatggtcattcttccagacaagattgatggattagaatccatagaacaaaatctaacagatacaaattttaagaaatggtgtgactttatggatgctatgtttatagatgttcacattcccaagtttaaggtaacaggctcgtataatctggtggatactctagtaaagtcaggactgacagaggtgttcggttcaactggagattatagcaatatgtgtaatttagatgtgagtgtcgacgctatgatccacaaaacgtatatagatgtcaatgaagagtatacagaagcagctgcagcaacttctgtactagtggcagactgtgcatcaacaattacaaatgagttctgtgcagatcatccgttcatctatgtgattaggcatgttgatggaaaaattcttttcgttggtagatattgctctccgacaactaattgttaaccattttttttaaaaaaaatagaaaaaacatgtggtattagtgcaggtcgttgttcttccaattgcaattggtaagatgacggccaactttagtacccacgtcttttcaccacagcactgtggatgtgacagactgaccagtattgatgacgtcaaacaatgtttgactgaatatatttattggtcgtcctatgcataccgcaacaggcaatgcgctggacaattgtattccacactcctctcttttagagatgatgcggaattagtgttcatcgacattcgcgagctggtaaaaaatatgccgtgggatgatgtcaaagattgtacagaaatcatccgttgttatataccggatgagcaaaaaaccatcagagagatttcggccatcatcggactttgtgcatatgctgctacttactggggaggtgaagaccatcccactagtaacagtctgaacgcattgtttgtgatgcttgagatgctaaattacgtggattataacatcatattccggcgtatgaattgatgagttgtacatcttgacattttcttctttcttccagaaacaaactttttttacccactataaaataaaatgagtatactacctgttatatttttttattcttcattcgttcagacttttaacgcgcctgaatgtatcgacaaagggcaatattttgcatcattcatggagttagaaaacgagccagtaatcttaccatgtccttaaataaatacgctatcatccggatataatatattagatattttatgggaaaaacgaggagcggataatggtagcaatatgctaattctgaacccgacacaatcagactctggtatttatatatgcattaccacgaacgaaacctactgtgacatgatgtcgttaaatttgacaatcgtgtctgtctcagaatcaaatatagattttatctcgtatccacaaatagtaaatgagagatctactggcgaaatggtatgtcccaatattaatgcatttattgctagtaacgtaaacgcagatattatatggagcggacatcgacgccttagaaataagagacttaaacaacggacacctggaattattaccatagaagatgttagaaaaaatgatgctggttattatacatgtgttttagaatatatatacggtggcaaaacatataacgtaaccagaattgtaaaattagaggtacgggataaaataataccttctactatgcaattaccagatggcattgtaacttcaataggtagtaatttgactattgcatgcagagtatcgttgagacctcccacaacggatgcagacgtcttttggataagtaatggtatgtattacgaagaagatgatggggacggaaacggtagaataagtgtagcaaataaaatctatatgaccgataagagacgtgttattacatcccggttaaacattaatcctgtcaaggaagaagatgctacaacgtttacgtgtatggcgtttactattcctagcatcagcaaaacagttactgttagtataacgtgaatgtatgttgttacatttccatgtcaattgagtttataagaatttttatacattatcttccaacaaacaattgacgaacgtattgctatgattaactcccacgatactatgcatattattaatcattaacttgcagactatacctagtgctattttgacatactcatgttcttgtgtaattgcggtatctatattattaaagtacgtaaatctagctatagttttattatttaattttagataatataccgtctccttatttttaaaaattgccacatcctttattaaatcatgaatgggaatttctatgtcatcgttagtatattgtgaacaacaagagcagatatctataggaaagggtggaatgcgatacattgatctatgtagttttaaaacacacgcgaactttgaagaatttatataaatcattccatcgatacatccttctatgttgagatgtatatatccaggaattcgtttattaatatcgggaaatgtataaactaaaacattgcccgaaagcggtgcctctatctgcgttatatccgttcttaacttacaaaatgtaaccaatacctttgcatgacttgttttgttcggcaacgttagtttaaacttgacgaatggattaattacaatagcatgatccgcgcatctattaagtttttttactttaacgcccttgtatgtttttacagagactttatctaaatttctagtgcttgtatgtgttataaatataacgggatatagaaccgaatcacctaccttagatacccaattacattttatcagatccagataataaacaaattttgtcgccctaactaattctatattgttatatattttacaattggttatgatatcatgtaataacttggagtctaacgcgcatcgtcgtacgtttatacaattgtgatttagtgtagtatatctacacatgtatttttccgcactatagtattctggactagtgataaaactatcgttatatctatcttcaatgaactcatcgagatattgctctctgtcatattcatacacctgcataaactttctagacatcttacaatccgtgttattttaggatcatatttacatatttacgggtatatcaaagatgttagattagttaatgggaatcgtctataataatgaatattaaacaattatatgaggacttttaccacaaagcatcataaaaatgagtcgtcgtctgatttatgttttaaatatcaaccgcaaatcaactcataaaatacaagagaatgaaatatatacatattttagtcattgcaatatagaccatacttctacagaacttgattttgtagttaaaaactatgatctaaacagacgacaacctgtaactgggtatactgcactacactgctatttgtataataattactttacaaacgatgtactgaagatattattaaatcatggagtggatgtaacgatgaaaaccagtagcggacgtatgcctgtttatatattgcttactagatgttgtaatatttcacatgatgtagtgatagatatgatagacaaagataaaaaccacttattacatagagactattccaacctattactagagtatataaaatctcgttacatgttattaaaggaagaggatatcgatgagaacatagtatccactttattagataagggaatcgatcctaactttaaacaagacggatatacagcgttacattattattatttgtgtctcgcacacgtttataaaccaggtgagtgtagaaaaccgataacgataaaaaaggccaagcgaattatttctttgtttatacaacatggagctaatctaaacgcgttagataattgtggtaatacaccattccatttgtatcttagtattgaaatgtgtaataatattcatatgactaaaatgctgttgacttttaatccgaatttcgaaatatgtaataatcatggattaacgcctatactatgttatataacttccgactacatacaacacgatattcttgttatgttaatacatcactatgaaacaaatgttggagaaatgccgatagatgagcgtcgtatgatcgtattcgagtttatcaaaacatattctacacgtccggcagattcgataacttatttgatgaataggtttaaaaatataaatatttatacccgctatgaaggaaagacattattacacgtagcatgtgaatataataatacacacgtaatagattatcttatacgtatcaacggagatataaatgcgttaaccgacaataacaaacacgctacacaactcattatagataacaaagaaaattccccatataccattaattgtttactgtatatacttagatatattgtagataagaatgtgataagatcgttggtggatcaacttccatctctacctatctttcgtcgcttatcatactagtcatatcctaaatgttgatcatattccaccaaatgattgtgaaagagattgagattaaatcgtctaacaaacaattagtttttatgacattaacatataataaataaattaatcattattgacttaacgatgacgaaagttatcatcatcttaggattcttaattattaatacaaattcattgtctatgaaatgtgaacaaggtgtctcatattataattcacaagaattaaagtgttgtaaactatgtaagccaggaacatattcagatcatcgatgtgataaatacagcgataccatttgtggacattgtccgagtgacacattcacgtcaatatataatcgttctccttggtgtcatagttgtagaggtccatgtggtactaatcgagtagaggtcacaccttgtacacctaccacaaatagaatctgtcattgtgactcgaatagttattgtctccttaaagcttctgatggtaactgtgttacatgtgctcctaaaacaaaatgtggtcgtgggtatggaaagaaaggagaagatgaaatgggtaataccatttgtaagaaatgtcggaagggtacttattcagatattgtatctgactctgatcaatgtaaaccaatgacaagataagacttactcgcatctactggatagacataaaatatcctcctcgtaataatgaaatataatatacactaattattaatatcaataacaatcgagtattaatatataggtcatttttaaatcccttttgggttccgtcccaaacggcgtttcggtctgcgtcgccgccatggccatgccgagcctctccgcgtgctcctccatcgaggacgacttcaactatggcagctcggtggcgtctgccagcgtgcacatacgaatggcatttctaagaaaagtctacggtatcctttgtctacaatttcttttaacaacggcaacaactgcagtatttttatactttgactgcatgcggacatttatacaagggagtcctgttctaatattggcatcaatgttcggatctataggcttgattttcgcattgactttacacagacataaacatcccctgaatctgtacctgctttgtggatttacactgtcggaatctctaacgctggcctctgttgttactttctatgatgtgcatgtcgttatgcaagctttcatgctgactactgcagcgtttcttgctctgactacatatactctacaatcaaagagagatttcagtaaacttggagcaggattgtttgctgctttgtggattttaattttgtcaggactcttggggatatttgtgcaaaatgagacagtgaagctggtcctgtctgcttttggggcccttgtattctgtggattcattatctatgacacgcactcactaatacataagctctcgcctgaagagtatgtgttagcctctatcaatctctacttggatatcatcaatctgttcttgcatctgttgcagcttttggaagtatctaataagaaataaagtttaaaatagaattaataaaaacatataggtcattttttaaacatggattggaaaccaaggtagttagttaatacacacaagatatatttttttcacatcatccacccatgggtaacaccaaggttgttagttaataatatacaagatattttttctcactctgatccatgtaaaccaaggacgagataagacactctcattcctcatctacaacccattaaaaaaatggaaattaaagccctctattagcatagacggctacaggtctaccttcacaatggcctttccttgtgccaagttcagtccctgtcattgccacgctactaaggactccctgaataccgtggccgacgtcagacattgtctgactgaatacatcctgtgggtttctcatagatggacccatagagaaactgcagggtctctctacaggcttctcatctctttcagaactgatgcaacggagctctttggtggtgagttgaaggattcacttccgtgggacaattgcgtggagatcattaaatgtttcatcagaaatgactccatgaaaaccgccgaagaacttcgtgcaatcattggactttgtactcaatcagctatcgtctctggaagagtcttcaacgataagtatatcgacatactacttatgctgcgaaagattctgaacgagaacgactatctcaccctcttggatcatatccgcactgctaaatactaaatctccactacactttttatcatcttatgaggaatgattgccttcgtgaaataggaataattagcaccagaatagctatggattattgtggtagagagtgcactattctatgtcgtctactggatgaagatgtgacgtacaaaaaaataaaactagaaattgaaacgtgtcacaacttatcaaaacatatagatagacgaggaaacaatgcgctacattgttacgtctccaataaatgcgatacagacattaagattgttctctcgcggagtcgagagactttgtagaaacaacgaaggattaactccgctaggagtatacagtaagcatagatacgtaaaatctcagattgtgcatctactgatatccagctattcaaattcctctaacgaactcaagtcgaatataaatgatttcgatctgtattcggataatatcgacttacgtctgctaaaatacctaattgtggataaacggatacgtccgtccaagaatacgaattatgcaatcaatggtctcggattggtggatatatacgtaacgagagaccagaagtattgctatggcttcttaaatcagaatgttacagcaccggttacgtatttcgtacctgtatgtacgacagtgatatgtgtaagaactctcttcattactatatatcgtctcatagagaatctcaatctctatccaaggatgtaattaaatgtttgatcgataacaatgtttccatccatggcagagacgaaggaggatctttacccatccaatactactggtctttctcaaccatagatatagagattgttaaattattattaataaaggatgtggacacgtgtagagtatacgacgtcagccctatattagaggcgtattatctaaacaagcgatttagagtaaccccatataatgtagacatggaaatcgttaatcttcttattgagagacgtcatactcttgtcgacgtaatgcgtagtattacttcgtacgattccagagaatataaccactacatcatcgataacattctaaagagatttagacaacaggatgtacaagccatgttgataaactacttacattacggcgatatggtcgttcgatgcatgttagataacggacaacaactatcctctgcacgactactttgttaataataatctcgtcgatgtaaacgtcgtaaggtttatcgtggaaaatatggacacgcggctgtaaatcacgtatcgaacaatggccgtctatgtatgtacggtctgatattatcgagatttaataattgcgggtatcactgttatgaaaccatactgatagatgtatttgatatactaagcaagtacatggatgatatagatatgatcgataactctactatattacgcggtcgatgtcaataatatacaatttgcaaagcggttattggaatatggagcgagtgtcacgctcgataatcaatacggccatccagaaaagcagttaccaaagagaaaacaaaacgaagctagttgatttattactgagttaccatcccactctagagactatgattgacgcatttaatagagatatacgctatctatatcctgaaccattattcgcctgtatcagatacgccttaatcctagatgatgattttccttctaaagtaaagtatgatatcgccggtcgtcataaggaactaaagcgctatagagtagacattaatagaatgaagaatgtctacatatcaggcgtctccatgtttgatatattatttaaacgaagcaaacgccacaaattgagatacgcaaagaatccgacatcaaatggtacaaaaaagaactaacgtccatcattacagaaactgtaaagaacaatgagaggatcgactccatagtggacaacattaatacagacgataacttgatttcgaaattacccatggagatactttattactccattaaataatttatcatggagcgataatgtcctgtttcatttgtttccatgacatattacaaaatcgattccgtccaagatgataaaaacatttaccggcatcataaacacggagtttattttatatgtctcgcataaacattactaaaaaaatatattgttcggttttctttcacatctttaattatgaaaaagtaaatcattatgagatggacgagattgtacgcatcgttcgcgacagtatgtggtacatacctaacgtatttatggacgacggtaagaatgaaggtcacgtttctgtcaacaatgtctgtcatatgtattttacgttctttgatgtggatacatcgtctcatctgtttaagctagttattaaacactgcgatctgaataaacgaggtaactctccattacattgctatacgatgaatacacgatttaatccatctgtattaaagatattgttacaccacggcatgcgtaactttgatagcaaggatgaccactatcaatcgataacaagatctttgatatactaacggacaccattgatgactttagtaaatcatccgatctattgctgtgttatcttagatataaattcaatgggagcttaaactattacgttctgtacaaaggatccgaccctaattgcgccgacgaggatgaactcacttctcttcattactactgtaaacacatatccacgttctacgaaagcaattattacaagttaagtcacactaagatgcgagccgagaagcgattcatctacgcgataatagattatggagcaaacattaacgcggttacacacttaccttcaacagtataccaaacatagtcctcgtgtggtgtatgctcttttatctcgaggagccgatacgaggatacgtaataatcttgattgtacacccatcatggaacgattgtgcaacaggtcatattctcataatgttactcaattggcacgaacaaaaggaagaaggacaacatctactttatctattcataaaacataatcaaggatacactctcaatatactacggtatctattagataggttcgacattcagaaagacgaatactataataccgcctttcaaaattgtaacaacaatgttgcctcatacatcggatacgacatcaaccttccgactaaagacggtattcgacttggtgtttgaaaacagaaacatcatatacaaggcggatgttgtgaatgacatcatccaccacagactgaaagtatctctacctatgattaaatcgttgttctacaagatgtctctccctacgacgattactacgtaaaaaagatactagcctactgcctattaagggacgagtcattcgcggaactacatagtaaattctgtttaaacgaggactataaaagtgtatttatgaaaaatatatcattcgataagatagattccatcatcgtgacataagtcgcctcaaagagattcgaatctccgacaccgacctgtatacggtatcacagctatcttaaagccatacattcagacagtcacatttcatttcccatgtacgacgatctcatagaacagtgccatctatcgatggagcgtaaaagtaaactcgtcgacaaagcactcaataaattagagtctaccatcggtcaatctagactatcgtatttgcctccggaaattatgcgcaatatcatctaaacagtatgttgtacggaaagaaccattacaaatattatccatgatagaaagaaaatatctatatgattggagaagtaggaaacaggaacaagacaacgattactacattattaaatcatgaagtccgtattatactcgtatatattgtttctctcatgtataataataaacggaagagatatagcaccgcatgcaccatccgatggaaagtgtaaagacaacgaatacaaacgccataatttgtgtccgggaacatacgcttccagattatgcgatagcaagactaacacacgatgtacgccgtgtggttcgggtaccttcacatctcgcaataatcatttacccgcttgtctaagttgtaacggaagacgcgatcgtgtaacacgactcacaatagaatctgtgaatgctctcccggatattattgtcttctcaaaggatcatccggatgcaaggcatgtgtttcccaaacaaaatgtggaataggatacggagtatccggagacgtcatctgttctccgtgtggtctcggaacatattctcacaccgtctcttccgcagataaatgcgaacccgtacccagtaatacgtttaactatatcgatgtggaaattaatctgtatcccgtcaacgacacgtcgtgtactcggacgaccactaccggtctcagcgaatccatctcaacgtcggaactaactattactatgaatcataaagactgtaatcccgtatttcgtgatggatacttctccgttcttaataaggtagcaacttcaggattctttacaggagaaaggtgtgcactctgaatttcgagattaaatgcaataacaaagattcttcctccaaacagttaacgaaagcaaagaatgatactatcatgccgcattcggagacagtaactctagtgggcgacatctatatactatatagtaataccaatactcaagactacgaaactgatacaatctcttatcatgtgggtaatgttctcgatgtcgatagccatatgcccggtagttgcgatatacataaactgatcactaattccaaacccacccactttttatagtaagtttttcacccataaataataaatacaataattaatttctcgtaaaagtagaaaatatattctaatttattgcgcggtaaggaagtagaatcataaagaacagtactcaatcaatagcaattatgaaacaatatatcgtcctggcatgcatgtgcctggcggcagctgctatgcctgccagtcttcagcaatcatcctcatcctcctcctcgtgtacggaagaagaaaacaaacatcatatgggaatcgatgttattatcaaagtcacaaagcaagaccaaacaccgaccaatgataagatttgccaatccgtaacggaaattacagagtccgagtcagatccagatcccgaggtggaatcagaagatgattccacatcagtcgaggatgtagatcctcctaccacttattactccatcatcggtggaggtctgagaatgaactttggattcaccaaatgtcctcagattaaatccatctcagaatccgctgatggaaacacagtgaatgctagattgtccagcgtgtccccaggacaaggtaaggactctcccgcgatcactcgtgaagaagctcttgctatgatcaaagactgtgaggtgtctatcgacatcagatgtagcgaagaagagaaagacagcgacatcaagacccatccagtactcgggtctaacatctctcataagaaagtgagttacgaagatatcatcggttcaacgatcgtcgatacaaaatgtgtcaagaatctagagtttagcgttcgtatcggagacatgtgcaaggaatcatctgaacttgaggtcaaggatggattcaagtatgtcgacggatcggcatctgaaggtgcaaccgatgatacttcactcatcgattcaacaaaactcaaagcgtgtgtctgaatcgataactctattcatctgaaattggatgagtagggttaatcgaacgattcaggcacaccacgaattaaaaaagtgtaccggacactatattccggtttgcaaaacaaaaatgttcttaactacattcacaaaaagttacctctcgcgacttcttctttttctgtctcaatagtgtgatacgattatgacactattcctattcctattcctattcctatttcctttcagggtatcacaaaaatattaaacctctttctgatggtctcataaaaaaagttttacaaaaatatttttattctctttctctctttgatggtctcataaaaaaagttttacaaaaatatttttattctctttctctctttgatggtctcataaaaaaagttttacaaaaatatttttattctctttctctctttgatggtctcataaaaaaagttttacaaaaatatttttattctctttctctctttgatggtctcataaaaaaagttttacaaaaatatttttattctctttctctctttgatggtctcataaaaaaagttttacaaaaatatttttattctctttctctctttgatggtctcataaaaaaagttttacaaaaatatttttattctctttctctctttgatggtctcataaaaaaagttttacaaaaatatttttattctctttctctctttgatggtctcataaaaaaagttttacaaaaatatttttattctctttctctctttgatggtctcataaaaaaagttttacaaaaatatttttattctctttctctctttgatggtctcataaaaaaagttttacaaaaatatttttattctctttctctctttgatggtctcataaaaaaagttttacaaaaatatttttattctctttctctctttgatggtctcataaaaaaagttttacaaaaatatttttattctctttctctctttgatggtctcataaaaaaagttttacaaaaat

SEQ ID NO: 9 - DNA, 188768 bp, Artificial Sequence
  LIVP 8.1.1
atcaaagagagaaagagaataaaaatatttttgtaaaacttttttatgagaccatcaaagagagaaagagaataaaaatatttttgtaaaactttttttatgagaccatcaaagagagaaagagaataaaaatatttttgtaaaactttttttatgagaccatcaaagagagaaagagaataaaaatatttttgtaaaactttttttatgagaccatcaaagagagaaagagaataaaaatatttttgtaaaactttttttatgagaccatcaaagagagaaagagaataaaaatatttttgtaaaactttttttatgagaccatcaaagagagaaagagaataaaaatatttttgtaaaactttttttatgagaccatcaaagagagaaagagaataaaaatatttttgtaaaactttttttatgagaccatcaaagagagaaagagaataaaaatatttttgtaaaactttttttatgagaccatcaaagagagaaagagaataaaaatatttttgtaaaactttttttatgagaccatcaaagagagaaagagaataaaaatatttttgtaaaactttttttatgagaccatcaaagagagaaagagaataaaaatatttttgtaaaactttttttatgagaccatcaaagagagaaagagaataaaaatatttttgtaaaactttttttatgagaccatcaaagagagaaagagaataaaaatatttttgtaaaactttttttatgagaccatcaaagagagaaagagaataaaaatatttttgtaaaactttttttatgagaccatcaaagagagaaagagaataaaaatatttttgtaaaactttttttatgagaccatcaaagagagaaagagaataaaaatatttttgtaaaactttttttatgagaccatcaaagagagaaagagaataaaaatatttttgtaaaactttttttatgagaccatcaaagagagaaagagaataaaaatatttttgtaaaactttttttatgagaccatcagaaagaggtttaatatttttgtgatactctgaaaggaaataggaataggaataggaatagtgtcataatcgtatcacactattgagacagaaaaagaagaagtcgcgagaggtaactttttgtgaatgtagttaagaacatttttgttttgcaaaccggaatatagtgtccggtacacttttttaattcgtggtgtgcctgaatcgttcgattaaccctactcatccaatttcagatgaatagagttatcgattcagacacacgctttgagttttgttgaatcgatgagtgaagtatcatcggttgcaccttcagatgccgatccgtcgacatacttgaatccatccttgacctcaagttcagatgattccttgcacatgtctccgatacgaacgctaaactctagattcttgacgcattttgtatcgacgatcgttgaaccgatgatatcttcgtaactcactttcttatgagagatgttagacccgagtactggatgggtcttgatgtcgctgtctttctcttcttcgctacatctgatgtcgatagacacttcacagtctttgatcatagcaagagcttcttcatgagtgatcgcgggagagtccttaccttgtcctggggacacgctggacaatctagcattcactgtgtttccatcagcggattctgagatggatttaatctgaggacatttggtgaatccaaagttcattctcagacctccaccgatgatggagtaataagtggtaggaggatctacatcctcgactgatgtggaatcatcttctgattccacctcgggatctggatctgactcggactctgtaatttccgttacggattggcaaatcttatcattggtcggtgtttggtcttgctttgtgactttgataataacatcgattcccatatgatgtttgttttcttcttccgtacacgaggaggaggatgaggatgattgctgaagactggcaggcatagcagctgccgccaggcacatgcatgccaggacgatatattgtttcataattgctattgattgagtactgttctttatgattctacttccttaccgtgcaataaattagaatatattttctacttttacgagaaattaattattgtatttattatttatgggtgaaaaacttactataaaaagtgggtgggtttggaattagtgatcagtttatgtatatcgcaactaccgggcatatggctatcgacatcgagaacattacccacatgataagagattgtatcagtttcgtagtcttgagtattggtattactatatagtatatagatgtcgcccactagagttactgtctccgaatgcggcatgatagtatcattctttgctttcgttaactgtttggaggaagaatctttgttattgcatttaatctcgaaattcagagtgcacacctttctcctgtaaagaaacctgaagtcgctaccttattaagaacggagaagtatccatcacgaaatacgggattacagtctttatgattcatagtaatagttagttccgacgttgagatggattcgctgagaccggtagtggtcgtccgagtacacgacgtgtcgttaactggatacaggttaatttccacatcgatatagttaaacgtatttctgggtacgggttcgcatttatctgcggaagagacggtgtgagaatatgttccgagaccacacggagaacagatgacgtctccggatactccgtatcctattccacattttgtttgggaaacacatgccttgcatccggatgatcctttgagaagacaataatatccgggagagcattcacagattctattgtgagtcgtgttacacgatcgcgtcttccgttacaacttagacaagcgggtaaatgattattgcgagatgtgaaggtacccgaaccacacggcgtacatcgtgtgttagtcttgctatcgcataatctggaagcgtatgttcccggacacaaattatggcgtttgtattcgttgtctttacactttccatcggatggtgcatgcggtgctatatctcttccgtttattattatacatgagagaaacaatatatacgagtataatacggacttcatgatttaataatgtagtaatcgttgtcttgttcctgtttcctacttctccaatcatatagatattttctttctatcatggataatatttgtaatggttctttccgtacaacatactgtttagatgatattgcgcataatttccggaggcaaatacgatagtctagattgaccgatggtagactctaatttattgagtgctttgtcgacgagtttacttttacgctccatcgatagatggcactgttctatgagatcgtcgtacatgggaaatgaaatgtgactgtctgaatgtatggctttaagatagctgtgataccgtatacaggtcggtgtcggagattcgaatctctttgaggcgacttatgtcacgatgatggaatctatcttatcgaatgatatatttttcataaatacacttttatagtcctcgtttaaacagaatttactatgtagttccgcgaatgactcgtcccttaataggcagtaggctagtatcttttttacgtagtaatcgtcgtagggagagacatcttgtagaacaacgatttaatcataggtagagatactttcagtctgtggtggatgatgtcattcacaacatccgccttgtatatgatgtttctgttttcaaacaccaagtcgaataccgtctttagtcggaaggttgatgtcgtatccgatgtatgaggcaacattgttgttacaattttgaaaggcggtattatagtattcgtctttctgaatgtcgaacctatctaatagataccgtagtatattgagagtgtatccttgattatgttttatgaatagataaagtagatgttgtccttcttccttttgttcgtgccaattgagtaacattatgagaatatgacctgttgcacaatcgttccatgatgggtgtacaatcaagattattacgtatcctcgagataaaagagcatacaccacacgaggactatgtttggtatactgttgaaggtaagtgtgtaaccgcgttaatgtttgctccataatctattatcgcgtagatgaatcgcttctcggctcgcatcttagtgtgacttaacttgtaataattgctttcgtagaacgtggatatgtgtttacagtagtaatgaagagaagtgagttcatcctcgtcggcgcaattagggtcggatcctttgtacagaacgtaatagtttaagctcccattgaatttatatctaagataacacagcaatagatcggatgatttactaaagtcatcaatggtgtccgttagtatatcaaagatcttgttatcgattgatagtggtcatccttgctatcaaagttacgcatgccgtggtgtaacaatatctttaatacagatggattaaatcgtgtattcatcgtatagcaatgtaatggagagttacctcgtttattcagatcgcagtgtttaataactagcttaaacagatgagacgatgtatccacatcaaagaacgtaaaatacatatgacagacattgttgacagaaacgtgaccttcattcttaccgtcgtccataaatacgttaggtatgtaccacatactgtcgcgaacgatgcgtacaatctcgtccatctcataatgatttactttttcataattaaagatgtgaaagaaaaccgaacaatatatttttttagtaatgtttatgcgagacatataaaataaactccgtgtttatgatgccggtaaatgtttttatcatcttggacggaatcgattttgtaatatgtcatggaaacaaatgaaacaggacattatcgctccatgataaattatttaatggagtaataaagtatctccatgggtaatttcgaaatcaagttatcgtctgtattaatgttgtccactatggagtcgatcctctcattgttctttacagtttctgtaatgatggacgttagttcttttttgtaccatttgatgtcggattctttgcgtatctcaatttgtggcgtttgcttcgtttaaataatatatcaaacatggagacgcctgatatgtagacattcttcattctattaatgtctactctatagcgctttagttccttatgacgaccggcgatatcatactttactttagaaggaaaatcatcatctaggattaaggcgtatctgatacaggcgaataatggttcaggatatagatagcgtatatctctattaaatgcgtcaatcatagtctctagagtgggatggtaactcagtaataaatcaactagcttcgttttgttttctctttggtaactgcttttctggatggccgtattgattatcgagcgtgacactcgctccatattccaataaccgctttgcaaattgtatattattgacatcgaccgcgtaatatagtagagttatcgatcatatctatatcatccatgtacttgcttagtatatcaaatacatctatcagtatggtttcataacagtgatacccgcaattattaaatctcgataatatcagaccgtacatacatagacggccattgttcgatacgtgatttacagccgcgtgtccatattttccacgataaaccttacgacgtttacatcgacgagattattattaacaaagtagtcgtgcagaggatagttgttgtccgttatctaacatgcatcgaacgaccatatcgccgtaatgtaagtagtttatcaacatggcttgtacatcctgttgtctaaatctctttagaatgttatcgatgatgtagtggttatattctctggaatcgtacgaagtaatactacgcattacgtcgacaagagtatgacgtctctcaataagaagattaacgatttccatgtctacattatatggggttactctaaatcgcttgtttagataatacgcctctaatatagggctgacgtcgtatactctacacgtgtccacatcctttattaataataatttaacaatctctatatctatggttgagaaagaccagtagtattggatgggtaaagatcctccttcgtctctgccatggatggaaacattgttatcgatcaaacatttaattacatccttggatagagattgagattctctatgagacgatatatagtaatgaagagagttcttacacatatcactgtcgtacatacaggtacgaaatacgtaaccggtgctgtaacattctgatttaagaagccatagcaatacttctggtctcggattaggcgtcgttacgtatatatccaccaatccgagaccattgattgcataattcgtattcttggacggacgtatccgtttatccacaattaggtattttagcagacgtaagtcgatattatccgaatacagatcgaaatcatttatattcgacttgagttcgttagaggaatttgaatagctggatatcagtagatgcacaatctgagattttacgtatctatgcttactgtatgctcctagcggagttaatccttcgttgtttctacaaagtctctcgactccgcgagagagtaacagccgaacaatcttaatgtctgtatcgcatttattgaagacgtaacaatgtagcgcattgtttcctcgtctatctatatgttttgataagttgtgacacgtttcaatctctggttttatttttttgtacgtcacatcttcatccagtagacgacatagaatagtgcactctctaccacaataatccatagctattctggtgctaattattcctatttcacgaaggcaatcattcctcataagatgataaaaagtgtagtggagatttagtatttagcagtgcggatatgatccaagagggtgagatagtcgttctcgttcagaatctttcgcagcataagtagtatgtcgatatacttatcgttgaagactctttataaaagtctatttgtttatatttattgcggatagcagtatttccctataaaaagtatacgtcctgtggtgtctttaatcatgtacatgaatggatggtttatgtagaccttcgtacgatataccatcgaaaagttaatcgtaaatactcctgtaacggccgatgcttctgtatactcctcattaacatctataaacgtcgtatgtagaaatttttctacagtgatagtttcattacacatcttgctaaaatctgcataatatccgaatatattagtaagtcctaaattttctaaaatcggtaccagattatacggttctgtcatttccactttaaactttggcatatacaagtctatacttttagtagataacataccacaccattttttaaatttttcatctgttatatttttttctatgttatatataccttctatgtcgtccggtagtataattaccatactagagtttccctcgtatggaatatcgataatagagaatcctccgaataattcattaatatgtacatattgcaagttattctcggtacccaccatcatatcaacgctggtaactatattcttagaaatataaaacttgtctgtatatgtaagatgtttagaaaatggatatttccacattgctttaaaatggacggcgctaacaactgtcatacgagtattaatggatagcggactagtcaataaggaattaattttaccatttgtcattgtcttaacccattcgttgattagttcctttgtttggttagcattattaaagtttacagtttgaaaatcgtcttttattttttgtaggaaggaggcgtggaactcgatactatcgctaccgtatattttatttgcggtagctagtgtcgcacaatacggaatatctacctccatgtcatcattattgtcatcgggtgtattctcattcatattctctatatattttgatagttgttcagctgtagaaccagctgctccatgatttagaatagataaagtagataaaatggaaactggagaaatcaaaacattttcatcagggtgttttaagattagttctttaaagatatccatggtatagacctaacgataacgatatatatcataaataaataatgttaaatttcaatttatgtttgtaccccgtattcatacttaacaaattggtattgcgtacacaatcaatcatattacataccattaataatgcaagcataaaaaattgttagtagatgtttctaaatataggttccgtaagcaaagaatataagaatgaagcggtaatgataaaatcaatcgttatctaaaatgatcatactcatttattttattctattatattaacacatacatttttaacagcaacacattcaatattgtattgttatttttatattatttacacaattaacaatatattattagtttatattactgaattaataatataaaattcccaatcttgtcataaacacagaatccatcaaaaatgttgataaattatctgatgttgttgttcgctgctatgataatcagatcattcgccgatagtggtaacgctatcgaaacgacattgccagaaattacaaacgctacaacagatattccagctatcagattatgcggtccagagggagatggatattgtttacacggtgactgtatccacgctagagatatcgacggtatgtattgtagatgctctcatggttatacaggcattagatgtcagcatgtagtattagtagactatcaacgttcagaaaacccaaacactacaacgtcatatatcccatctcccggtattatgcttgtattagtaggcattattatgtgttgtctattatctgtttataggttcactcgacgaactaaactacctatacaagatatggttgtgccataatttttataaatttttttatgagtatttttacaaaaatgtataaagtgtatgtcttatgtatatttataaaaatgctaagtatgcgatgtatctatgttatttgtatttatctaaacaatacctctacctctagatattatacaaaaattttttatttcggcatattaaagtaaaatctagttaccttgaaaatgaatacagtgggtggttccgtatcaccagtaagaacataatagtcaaatacagtatccgattgagattttgcatacaatactagtctagaaagaaatttgtaatcatcttctgtgacgggagtccatatatctgtatcatcgtctagtttatcagtgtcccatgctatattcctgttatcatcattagttaatgaaaataactctcgtgcttcagaaaagtcaaatattgtatccatacatacatctccaaaactatcgcttatacgtttatctttaacgatacctatacctagatggttatttactaacagacattttccagatctattgactataactcctatagtttccacatcaaccaagtaatgatcatctattgttatataacaataacataactcttttccatttttatcagtatgtatatctatatcaacgtcgtcgttgtagtgaatagtagtcattgatctattatatgaaacggatatgtctagaacggcaattgttttacgtccagttaacactttcgttgatttaaagtctagagtctttgcaaacataatatccttatccgactttatatttcctgtagggtggtataattttattttgcctccacatatcggtgtttccaaatatattactagacaatattccatatagttattagttaagggtacccaattagaacacgtacgcttattatcatcatttggatcgtatttcataaaagttattgtgttatcgatgtcaacacattctacattttttaatcgtctatatagtatttttctgatattttctataatatcagaattgtcttccatcggaagttgtatactatcggaatcagttacatgtttaaataattctctgatgtcattccttatacaatcaaattcattattaaacagtttaatagtctgtagacctttatcgtcgtaaatatccattgtcttattagttacgcttatttttatgtgtttttacgttgctttattatattttataagaatgattgtttgacgaatcacgagaactattaagacacattattaggtatatattataaaaaagtttttgattacgatgttataagaggaaagaggacacattaacatcatacatcaattaactacattcttataacatcgtaatcaaaagaattgcaattttgatgtataacaactgtcaatgggttatggaattgtatattacatattatacggtatgttggtaacgacaaataccggtcggtaattgtctgccggtgtaatagaattatatatatctatctattacaccggccttgtatacataataataagttgtggtagtatgatctccatatttataatttaggactttgtattcagtatttttggaatcataaaaaataaaaaaaagttttactaatttaaaatttaaaaagtatttacatttttttcactgtttagtcgcggatatggaattcgatcctgccaaaatcaatacatcatctatagatcatgtaacaatattacaatacatagatgaaccaaatgatataagactaacagtatgcattatccgaaatattatatcaatatcacaaaaataaatacacatttggctaatcaatttcgggcttggaaaaaacgtatcgccggaagggactatatgactaacttatctagagatacaggaatacaacaatcaaaacttactgaaactatacgtaactgtcaaaaaaatagaaacatatatggtctatatatacactacaatttagttattaattggataaccgatgtgattatcaatcaatattaagagggttggtaaattggtacatagctaataatacctatacacccaataatacaacaaccatttctgagttggatatcatcaaaatactaaataaatacgaggacgtgtatagagtaagtaaagaaaaagaatgtggaatttgctatgaagttgtttactcaaaacgatagatactttggtttattggattcgtgtactcatatattttgcataacatgcatcaatatatggcatagaacacgaagagaaaccggtgcgtcggataattgtcctatatgccgtacccgttttagaaacataacaatgagcaagttctataagctagttaactaataaataaaaagtttaatttgttgacgacgtatgtcgttattttttctcgtataaaagattaatttgattctaatataatctttagtattggataaatatcaattcaaattaattccattagattatatcataaataaaaatagtagcacgcactacttcagccaaatattcttttttgaaacgccatctatcgtagtgaggacacaagtgaacctataattatcaaatttattagtatcagtcacatgaaggactttacgtagagtgacgattccactatctgtggtacgaacggtttcatcttctttgatgccatcacccagatgttctataaacttggtatcctcgtccgatctcatatcctttgccaaccaatacatgtagctaaaattaggcataaatttcacacatcctgaacaatgaaattctccagaagatgttacaatgtctagatttggacatttggtttcaaccgcgttaacatatgagtgaacacacccatacatgaaagcgatgagaaataggattctcatcttgccaaaatatcactagaaaaaatttatttatcagttttaaaggtataaaaaatacttattgttgctcgaatattttgtatttgatggtatacggaagattagaaatgtaggtattatcatcaactgattctatggttttatgtattctatcatgtttcactattgcgttggaaataatatcatacgcttccacatatattttattttgttttaactcataatactcacgtaattctggattattggcatatctatgaataattttagctccatgatcagtaaatattaatgagaacatagtattaccacctaccattatttttttcatctcattcaattcttaattgcaaagatctatataatcattatagcgttgacttatggactctggaatcttagacgatgtacagtcatctataatcatggcatatttaatacattgttttatagcatagtcgttatctacgatgttagatatttctctcaatgaatcaatcacacaatctaatgtaggtttatgacataatagcattttcagcagttcaatgtttttagattcgttgatggcaatggctatacatgtatatccgttatttgatctaatgttgacatctgaaccggattctagcagtaaagatactagagattgtttattatatctaacagccttgtgaagaagtgtttctcctcgtttgtcaatcatgttaatgtctttaagataaggtaggcaaatgtttatagtactaagaattgggcaagcataagacatgtcacaaagacccttttttgtatgtataagtgtaaaaattataacatccatagttggatttacataggtgtccaatcgggatctctccatcatcgagataattgatggcatctcccttccttttttagtagatatttcatcgtgtaagaatcaatattaatatttctaaagtatccgtgtatagcctctttatttaccacagctccatattccactagagggatatcgccgaatgtcatatactcaattagtatatgttggaggacatccgagttcattgttttcaatatcaaagagatggtttccttatcatttctccatagtggtacaatactacacattattccgtgcggctttccattttccaaaaacaatttgaccaaatctaaatctacatctttattgtatctataatcactatttagataatcagccataattcctcgagtgcaacatgttagatcgtctatatatgaataagcagtgttatctattcctttcattaacaatttaacgatgtctatatctatatgagatgacttaatataatattgaagagctgtacaatagtttttatctataaaagacggcttgattccgtgattaattagacatttaacaacttccggacgcacatatgctctcgtatccgactctgaatacagatgagagatgatatacagatgcaatacggtaccgcaatttcgtagttgataatcatcatacgcgtatcagtactcgtcctcataaagaacactgcagccattttctatgaacaaatcaataattttagaaacaggatcattgtcattacataattttctataactgaacgatggttttcacatttaacactcaagtcaaatccatgttctaccaacacctttatcaagtcaacgtctacatttttggatttcatatagctgaatatattaaagttatttatgttgctaaatccagtggcttctagtagagccatcgctatatccttattaactttaacatgtctactatttgtgtattcttctaatggggtaagctgtctccaatttttgcgtaatggattagtgccactgtctagtagtagtttgacgacctcgacattattacaatgctcattaaaaaggtatgcgtgtaaagcattattcttgaattggttcctggtatcattaggatctctgtctttcaacatctgtttaagttcatcaagagccacctcctcattttccaaatagtcaaacattttgactgaatgagctactgtgaactctatacacccacacaactaatgtcattaaatatcatgtcaaaaacttgtacaattattaataaaaataatttagtgtttaaattttaccagttccagattttacacctccgttaatacctccattaaccccactggacgatcctcctccccacattccaccgccaccagatgtataagttttagatcctttattactaccatcatgtccatggataaagacactccacatgccgccactaccccctttagaagacatattaataagacttaaggacaagtttaacaataaaattaatcacgagtaccctactaccaacctacactattatatgattatagtttctatttttacagtaccttgactaaagtttctagtcacaagagcaatactaccaacctacactattatatgattatagtttctatttttataggaacgcgtacgagaaaatcaaatgtctaatttctaacggtagtgttgataaacgattgttatccgcggatacctcctctatcatgtcgtctattttcttactttgttctattaacttattagcattatatattatttgattataaaacttatattgcttattagcccaatctgtaaatatcggattattaacatatcgtttctttgtaggtttatttaacatgtacatcactgtaagcatgtccttaccatttattttaatttgacgcatatccgcaatttctttttcgcagtcggttataaattctatatatgatggatacatgctacatgtgtacttataatcgactaatatgaagtacttgatacatattttcagtaacgatttattattaccacctatgaataagtacctgtgatcgtctaggtaatcaactgttttcttaatacattcgatggttggtaatttactcagaataatttccaatatcttaatatataattctgctatttctgggatatatttatctgccagtataacacaaatagtaatacatgtaaacccatattttgttattatattaatgtctgcgccattatctattaaccattctactaggctgacactatgcgactcaatacaatgataaagtatactacatccatgtttatctattttgtttatatcatcaatatacggcttacaaagttttagtatcgataacacatccaactcacgcatagagaaggtagggaataatggcataatatttattaggttatcatcattgtcattatctacaactaagtttccattttttaaaatatactcgacaactttaggatctctattgccaaatttttgaaaatatttatttatatgcttaaatctatataatgtagctccttcatcaatcatacatttaataacattgatgtatactgtatgataagatacatattctaacaatagatcttgtatagaatctgtatatcttttaagaattgtggatattaggatattattacataaactattacacaattctaaaatataaaacgtatcacggtcgaataatagttgatcaactatataattatcgattttgtgatttttcttcctaaactgtttacgtaaatagttagatagaatattcattagttcatgaccactatagttactatcgaataacgcgtcaaatatttcccgtttaatatcgcatttgtcaagataataatagagtgtggtatgttcacgataagtataataacgcatctctttttcgtgtgaaattaaatagtttattacgtccaaagatgtagcataaccatcttgtgacctagtaataatataataatagagaactgttttacccattctatcatcataatcagtggtgtagtcgtaatcgtaatcgtctaattcatcatcccaattataatattcaccagcacgtctaatctgttctattttgatcttgtatccatactgtatgttgctacatgtaggtattcctttatccaataatagtttaaacacatctacattgggatttgatgttgtagcgtatttttctacaatattaataccatttttgatactatttatttctatacctttcgaaattagtaatttcaataagtctatattgatgttatcagaacatagatattcgaatatatcaaaatcattgatatttttatagtcgactgacgacaataacaaaatcacaacatcgtttttgatattattatttttcttggtaacgtatgcctttaatggagtttcaccatcatactcatataatggatttgcaccactttctatcaatgattgtgcactgctggcatcgatgttaaatgttttacaactatcatagagtatcttatcgttaaccatgattggttgttgatgctatcgcattttttggtttctttcatttcagttatgtatggatttagcacgtttgggaagcatgagctcatatgatttcagtactgtagtgtcagtactattagtttcgatcagatcaatgtctagatctatagaatcaaaacacgataggtcagaagataatgaatatctgtaggcttcttgttgtactgtaacttctcgttttgttagatggttgcatcgtgctttaacatcaatggtacaaattttatcctcgctttgtgtatcatattcgtccctactataaaattgtatattcagattatcatgagatgtgtatacgctaacggtatcaataaacggagcacaccatttagtcataaccgtaatccaaaaatttttaaagtatatcttaacgaaagaagttgtgtcattgtctacggtgtatggtactagatcctcataagtgtatatatctagagtaatgtttaatttattaaatggttgataatatggatcctcatgacaatttcctaagacgaaaataagacataaacacgcaataaatctaatcgaagacatggttactccttaaaaaaatacgaataatcaccttggctatttagtaagtgtcatttaacactatactcatattaatccatggactcataatctctatacgggattaacggatgttctatatacggggatgagtagttctcttctttaactttatactttttactaatcatatttagactgatgtatgggtaatagtgtttgaagagctcgttctcatcatcagaataaatcaatatctctgtttttttgttatacagatgtattacagcctcatatattacgtaatagaacgtgtcatctaccttattaactttcaccgcatagttgtttgcaaatacggttaatcctttgacctcgtcgatttccgaccaatctgggcgtataatgaatctaaactttaatttcttgtaatcattcgaaataatttttagtttgcatccgtagttatcccctttatgtaactgtaaatttctcaacgcgatatctccattaataatgatgtcgaattcgtgctgtatacccatactgaatggatgaacgaataccgacggcgttaatagtaatttactttttcatctttacatattgggtactagttttactatcataagtttataaattccacaagctactatggaataagccaaccatcttagtataccacacatgtcttaaagtttattaattaattacatgttgttttatatatatcgctacgaatttaaagagaaattagtttaggaaaaaaaattatctatctacatcatcacgtctctgtattctacgatagagtgctactttaagatgcgacagatctgtgtcatcaaatatatactccattaaaatgattattccggcagcgaacttgatattggatatatcacaacctttgttaatatctacgacaatagacagcagtcccatggttccataaacagtgagtttatctttctttgaagagatattttgtagagatcttataaaactgtcgaatgacatcgcatttatatctttagctaaatcgtatatgttaccatcgtaatatctaaccgcgtctatcttaaacgtttccatcgctttaaagacgtttccgatagatggtctcatttcatcagtcatactgagccaacaaatataatcgtgtataacatctttgatagaatcagactctaaagaaaacgaatcggctttattatacgcattcatgataaacttaatgaaaaatgtttttcgttgtttaagttggatgaatagtatgtcttaataattgttattatttcattaattaatatttagtaacgagtacactctataaaaacgagaatgacataactaatcataactagttatcaaagtgtctaggacgcgtaattttcatatggtatagatcctgtaagcattgtctgtattctggagctattttctctatcgcattagtgagttcagaatatgttataaatttaaatcgaataacgaacataactttagtaaagtcgtctatattaactcttttattttctagccatcgtaataccatgtttaagatagtatattctctagttactacgatctcatcgttgtctagaatatcacatactgaatctacatccaattttagaaattggtctgtgttacatatctcttctatattattgttgatgtattgtcgtagaaaactattacgtagaccattttctttataaaacgaatatatagtactccaattatctttaccgatatatttgcacacataatccattctctcaatcactacatctttaagattttcgttgttaagatatttggctaaactatataattctattagatcatcaacagaatcagtatatatttttctagatccaaagacgaactctttggcgtcctctataatattcccagaaaagatattttcgtgttttagtttatcgagatctgatctgttcatatacgccatgattgtacggtacgttatgataaccgcataaaataaaaatccattttcatttttaaccaatactattcataattgagattgatgtaatactttgttactttgaacgtaaagacagtacacggatccgtatctccaacaagcacgtagtaatcaaatttggtgttgttaaacttcgcaatattcatcaatttagatagaaacttatactcatcatctgttttaggaatccatgtattattaccactttccaacttatcattatcccaggctatgtttcgtccatcatcgttgcgcagagtgaataattcttttgtattcggtagttcaaatatatgatccatgcatagatcggcaaagctattgtagatgtgatttttcctaaatctaatataaaactcgtttactagcaaacactttcctgatttatcgaccaagacacatatggtttctaaatctatcaagtggtggggatccatagttatgacgcagtaacatatattattacattcttgactgtcgctaatatctaaatatttattgttatcgtattggattctgcatatagatggcttgtatgtcaaagatatagaacacataaccaatttatagtcgcgctttacattctcgaatctaaagttaagagatttagaaaacattatatcctcggatgatgttatcactgtttctggagtaggatatattaaagtctttacagatttcgtccgattcaaataaatcactaaataatatcccacattatcatctgttagagtagtatcattaaatctattatattttatgaaagatatatcactgctcacctctatatttcgtacatttttaaactgtttgtataatatctctctgatacaatcagatatatctattgtgtcggtagacgataccgttacatttgaattaatggtgttccattttacaacttttaacaagttgaccaattcatttctaatagtatcaaactctccatgattaaatattttaatagtatccattttatatcactacggacacaaagtagctgacataaaccattgtataatttttatgttttatgtttattagcgtacacattttggaagttccggcttccatgtatttcctggagagcaagtagatgatgaggaaccagatagtttatatccgtacttgcacttaaagtctacattgtcgttgtatgagtatgatcttttaaacccgctagacaagtatccgtttgatattgtaggatgtggacatttaacaatctgacacgtgggtggatcggaccattctcctcctgaacacaggacactagagttaccaatcaacgaatatccactattgcaactataagttacaacgctcccatcggtataaaaatcctcgtatccgttatgtcttccgttggatatagatggaggggattggcatttaacagattcacaaataggtgcctcgggattccataccatagatccagtagatcctaattcacaatacgatttagattcaccgatcaactgatatccgctattacaagagtacgttatactagagccaaagtctactccaccaatatcaagttggccattatcgatatctcgaggcgatgggcatctccgtttaatacattgattaaagagtgtccatccagtacctgtacatttagcatatataggtcccattttttgctttctgtatccaggtagacatagatattctatagtgtctcctatgttgtaattagcattagcatcagtctccacactattcttaaatttcatattaatgggtcgtgacggaatagtacagcatgatagaacgcatcctattcccaacaatgtcaggaacgtcacgctctccaccttcatatttatttatccgtaaaaatgttatcctggacatcgtacaaataataaaaagcccatatatgttcgctattgtagaaattgtttttcacagttgctcaaaaacgatggcagtgacttatgagttacgttacactttggagtctcatctttagtaaacatatcataatattcgatattacgagttgacatatcgaacaaattccaagtatttgattttggataatattcgtattttgcatctgctataattaagatataatcaccgcaagaacacacgaacatctttcctacatggttaaagtacatgtacaattctatccatttgtcttccttaactatatatttgtatagataattacgagtctcgtgagtaattccagtaattacatagatgtcgccgtcgtactctacagcataaactatactatgatgtctaggcatgggagacttttttatccaacgatttttagtgaaacattccacatcgtttaatactacatatttctcatacgtggtataaactccacccattacatatatatcatcgtttacgaataccgacgcgcctgaatatctaggagtaattaagtttggaagtcttatccatttcgaagtgccgtgtttcaaatattctgccacacccgttgaaatagaaaattctaatcctcctattacatataactttccatcgttaacacaagtactaacttctgattttaacgacgacatattagtaaccgttttccattttttcgttttaagatctacccgcgatacggaataaacatgtctattgttaatcatgccgccaataatgtatagacaattatgtaaaacatttgcattatagaattgtctatctgtattaccgactatcgtccaatattctgttctaggagagtaatgggttattgtggatatataatcagagtttttaatgactactatattatgttttataccatttcgtgtcactggctttgtagatttggatatagttaatcccaacaatgatatagcattgcgcatagtattagtcataaacttgggatgtaaaatgttgatgatatctacatcgtttggatttttatgtatccactttaataatatcatagctgtaacatcctcatgatttacgttaacgtcttcgtgggataagatagttgtcagttcatcctttgataattttccaaattctggatcggatgtcaccgcagtaatattgttgattatttctgacatcgacgcattatatagttttttaattccatatcttttagaaaagttaaacatccttatacaatttgtgaaattaatattatgaatcatagtttttacacatagatctactacaggcggaacatcaattattatggcagcaactagtatcatttctacattgtttatggtgatgtttatcttcttccagcgcatatagtctaatagcgattcaaacgcgtgatagtttataccattcaatataatcgcttcatcctttagatggtgatcctgaatgcgtttaaaaaaattatacggagacgccgtaataatttccttattcacttgtataatttccccattgatagaaaatatcacgctttccattcttaaagtactataagtaattatagtataatgtaaacgtttatatattcaatatttttataaaaatcattttgacattaattcctttttaaatttccgtctatcatctatagaaacgtattctatgaatttataaaatgcttttacgtgtcctatcgtaggcgatagaaccgctaaaaagcctatcgaatttctacaaaagaatctgttatatggtatagggagagtataaaacattaaatgtccgtacttattaaagtattcagtagccaatcctaactctttcgaatacttattaatggctcttgttctgtacgaatctatttttttgaacaacggacctagtggtatatcttgttctatgtatctaaaataatgtctgactagatccgttagtttaatatccgcagtcatcttgtctagaatggcaaatctaactgcgggtttaggctttagtttagtttctatatctacatctatgtctttatctaacaccaaaaatataatagctaatattttattacaatcatccggatattcttctacgatctcactaactaatgtttctttggttatactagtatagtcactatcggacaaataaagaaaatcagatgatcgatgaataatacatttaaattcatcatctgtaagatttttgagatgtctcattagaatattattagggttagtactcattatcattcggcagctattacttattttattatttttcaccatatagatcaatcattagatcatcaaaatatgtttcaatcatcctaaagagtatggtaaatgactcttcccatctaatttctgaacgttcaccaatgtctctagccactttggcactaatagcgatcattcgcttagcgtcttctatattattaactggttgattcaatctatctagcaatggaccgtcggacagcgtcattctcatgttcttaatcaatgtacatacatcgccgtcatctaccaattcatccaacaacataagctttttaaaatcatcattataataggtttgatcgttgtcatttctccaaagaatatatctaataagtagagtcctcatgcttagttaacaactattttttatgttaaatcaattagtacaccgctatgtttaatacttattcatattttagtttttaggattgagaatcaatacaaaaattaatgcatcattaattttagaaatacttagtttccacgtagtcaatgaaacatttgaactcatcgtacaggacgttctcgtacaggacgtaactataaaccggtttatatttgttcaagatagatacaaatccgataactttttttacgaattctacgggatccactttaaaagtgtcataccgggttctttttatttttttaaacagatcaatggtgtgatgttgattaggtcttttacgaatttgatatagaatagcgtttacatattctccataatggtcaatcgccatttgttcgtatgtcataaattctttaattatatgacactgtgtattgtttagttcatccttgttcattgttaggaatctatccaaaatggcaattatactagaactataggtgcgttgtatacacatattgatgtgtctgtttatacaatcaatgctactaccttcgggtaaaattgtagcatcatataccatttctagtactttaggttcattattatccattgcagaggacgtcatgatcgaatcataaaaaaatatattatttttatgttattttgttaaaaataatcatcgaatacttcgtaagatactccttcatgaacataatcagttacaaaacgtttatatgaagtaaagtatctacgatttttacaaaagtccggatgcataagtacaaagtacgcgataaacggaataataatagatttatctagtctatctttttctatagctttcatagttagatacatggtctcagaagtaggattatgtaacatcagcttcgataaaatgactgggttatttagtcttacacattcgctcatacatgtatgaccgttaactacagagtctacactaaaatgattgaacaatagatagtctaccattgtttcgtattcagatagtacagcgtagtacatggcatcttcacaaattatatcattgtctaatagatatttgacgcatcttatggatcccacttcaacagccatcttaaaatcggtagaatcatattgctttcctttatcattaataatttctagaacatcatctctatcataaaagatacaaatattaactgtttgatccgtaataacattgctagtcgatagcaatttgttaataagatgcgctgggctcaatgtcttaataagaagtgtaagaggactatctccgaatttgttttgtttattaacatccgttgatggaagtaaaagatctataatgtctacattcttgactgttttagagcatacaatatggagaggtgtatttccatcatgatctggttttgagggactaattcctagtttcatcatccatgagattgtagaagcttttggattgtctgacataagatgtctatgaatatgatttttgccaaatttatccactatcctggcttcgaatccgatggacattatttttttaaacactctttctgaaggatctgtacacgccaacaacggaccacatccttcttcatcaaccgagttgttaatcttggctccatactgtaccaataaatttattctctctatgacttcatcatctgttcccgagagataatatagaggcgttttatgctgtttatcacacgcgtttggatctgcgccgtgcgtcagcagcatcgcgactattctattattattaattttagaagctatatgcaatggataatttccatcatcatccgtctcatttggagagtatcctctatgaagaagttcttcgacaaatcgttcatctagtcctttaattccacaatacgcatgtagaatgtgataattatttccagaaggttcgatagcttgtagcatattcctaaatacatctaaatttttactattatatttggcataaagagatagataatactcggccgacataatgttgtccattgtagtataaaaattaatatttctatttctgtatatttgcaacaatttactctctataacaaatatcataacttagttcttttatgtcaagaaggcactggtttagttcatctataaatgtcacgccataactaccacgcatgccatactcagaattatgataaagatatttatccttggggtgtaggtaatggggattaatctttgttggatcagtctctaagttaacacatgtcacacatgatccatttatagttatatcacacgatgatgatttatgaattgattccggaagatcgctatcgtattttgtggttccacaattcatttccatacatgttattgtcacactaatattatgatgaactttatctagccgctgagtggtaaacaacagaacagatagtttattatctttaccaacaccctcagccgctgccacaaatctctgatccgtatccatgatggtcatgtttatttctagtccgtatccagtcaacactatgttagcatttctgtcgatatagctttcactcatatgacactcaccaataatagtagaattaatgtcgtaatttacaccaatagtgagttcggcggcaaagtaccaataccggtaatcttgtcgaggaggacatatagtattcttgtattctaccgaatacccgagagatgcgatacaaaagagcaagactaatttgtaaaccatcttactcaaaatatgtaacaatagtacgatgcaatgagtaagacaataggaaatctatcttatatacacataattattctatcaattttaccaattagttagtgtaatgttaacaaaaatgtgggagaatctaattagtttttctttacacaattgacgtacatgagtctgagttccttgtttttgctaattatttcatccaatttattattcttgacgatatcgagatcttttgtataggagtcaaacttgtattcaacatgcttttctataatcattttagctatttcggcatcatccaatagtacattttccagattagcagaatagatattaatgtcgtatttgaacagagcctgtaacatctcaatgtctttattatctatagccaatttaatgtccggaatgaagagaagggaattattggtgtttgtcgacgtcatatagtcgagcaagagaatcatcatatccacgtgtccattttttatagtgatgtgaatacaactaaggagaatagccagatcaaaagtagatggtatctctgaaagaaagtaggaaacaatacttacatcattaagcatgacggcatgataaaatgaagttttccatccagttttcccatagaacatcagtctccaatttttcttaacaaacagttttaccgtttgcatgttaccactatcaaccgcataatacaatgcggtgtttcccttgtcatcaaattgtgaatcatccagtccactgaatagcaaaatctttactattttggtatcttccaatgtggctgcctgatgtaatggaaattcattctctagaagatttttcaatgctccagcgttcaacaacgtacatactagacgcacgttattatcagctattgcataatacaaggcactatgtccatggacatccgccttaaatgtatctttactagagagaaagcttttcagctgcttagacttccaagtattaattcgtgacagatccatgtctgaaacgagacgctaattagtgtatattttttcattttttataattttgtcatattgcaccagaattaataatatctttaatagatctgattagtagatacatggctatcgcaaaacaacatatacacatttaataaaaataatatttattaagaaaattcagatttcacgtacccatcaatataaataaaataatgattccttacaccgtacccatattaaggagattccaccttacccataaacaatataaatccagtaatatcatgtctgatgatgaacacaaatggtgtattaaattccagtttttcaggagatgatctcgccgtagctaccataatagtagatgcctctgctacagttccttgttcgtcgacatctatctttgcattctgaaacattttataaatatataatgggtccctagtcatatgtttaaacgacgcattatctggattaaacatactaggagccatcatttcggctatcgacttaatatccctcttattttcgatagaaaatttagggagtttaagattgtacactttattccctaattgagacgaccaatagtctaattttgcagccgtgatagaatctgtgaaatgggtcatattatcacctattgccaggtacatactaatattagcatccttatacggaaggcgtaccatgtcatattctttgtcatcgattgtgattgtatttccttgcaatttagtaactacgttcatcatgggaaccgttttcgtaccgtacttattagtaaaactagcattgcgtgttttagtgatatcaaacggatattgccatatacctttaaaatatatagtattaatgattgcccatagagtattattgtcgagcatattagaatctactacattagacataccggatctacgttctactatagaattaattttattaaccgcatctcgtctaaagtttaatctatataggccgaatctatgatattgttgataatacgacggtttaatgcacacagtattatctacgaaactttgataagttagatcagtgtacgtatatttagatgttttcagcttagctaatcctgatattaattctgtaaatgctggacccagatctctttttctcaaatccatagtcttcaataattctattctagtattacctgatgcaggcaatagcgacataaacatagaaaacgaataaccaaacggtgagaagacaatattatcatcttgaatatttttatacgctactataccggcattggtaaatccttgtagacgataggcggacgctgaacacgctaacgatagtatcaataacgcaatcatgattttatggtattaataattaaccttatttttatgttcggtataaaaaaattattgatgtctacacatccttttgtaattgacatctatatatccttttgtataatcaactctaatcactttaacttttacagttttccctaccagtttatccctatattcaacatatctatccatatgcatcttaacactctctgccaagatagcttcagagtgaggatagtcaaaaagataaatatatagagcataatcattctcgtatactctgccctttattacatcacccgcattgggcaacgaataacaaaatgcaagcatcttgttaacgggctcgtaaattgggataaaaattatgtttttattgtcttatatctattttattcaagagaatattcaggaatttctttttccggttgtatctcgtcgcagtatatatcatttgtacattgtttcatattttttaatagtttacaccttttagtaggactagtatcgtacaattcatagctgtattttgaattccaatcacgcataaaaatatcttccaattgttgacgaagacctaatccatcatccggtgtaatattaatagatgctccacatgtatccgtaaagtaatttcctgtccaatttgaggtacctatataggccgttttatcggttaccatatatttggcatggtttaccctagaatacggaatgggaggatcagcatctggtacaataaatagctttacttctatatttatgtttttagattttagcatagcgatagatcttaaaaagtttctcatgataaacgaagatcgttgccagcaactaatcaatagcttaacggatacttgtctgtctatagcggatcttcttaattcatcttctatataaggccaaaacaaaattttacccgccttcgaataaataatagggataaagttcataacagatacataaacgaatttactcgcatttctaatacatgacaataaagcggttaaatcattggttctttccatagtacatagttgttgcggtgcagaagcaataaatacagagtgtggaacgccgcttacgttaatactaagaggatgatctgtattataatacgacggataaaagtttttccaattatatggtagattgttaactccaagataccagtatacctcaaaaatttgagtgagatccgctgccaagttcctattattgaagatcgcaatacccaattccttgacctgagttagtgatctccaatccatgttagcgcttcctaaataaatatgtgtattatcagatatccaaaattttgtatgaagaactcctcctaggatatttgtaatatctatgtatcgtacttcaactccggccatttgtagtctttcaacatcctttaatggtttgttagatttattaacggctactctaactcgtactcctcttttgggtaattgtacaatctcgtttaatattatcgtgccgaaattcgtacccacttcatccgataaactccaataaaaagatgatatatctagtgtttttgtggtattggatagaatttccctccacatgttaaatgtagacaaatatactttatcaaattgcatacctataggaatagtttctgtaatcactgcgattgtattatccggattcattttatttgttaaaagaataatcctatatcacttcactctattaaaaatccaagtttctatttctttcatgactgattttttaacttcatccgtttccttatgaagatgatgtttggcaccttcataaatttttatttctctattacaatttgcatgttgcatgaaataatatgcacctaaaacatcgctaatcttattgtttgttccctggagtatgagagtcgggggggtgttaatcttggaaattatttttctaaccttgttggtagccttcaagacctgactagcaaatccagccttaattttttcatgattgactaatgggtcgtattggtatttataaactttatccatatctctagatactgattctggacatagctttccgactggcgcatttggtgtgatggttcccataagtttggcagctagcagattcagtcttgaaacagcatctgcattaactagaggagacattagaatcattgctgtaaacaagtttggattatcgtaagaggctagctcccatggaatgacccaataagtagatttaatagttaccacgtgctgtaccaaagtcatcaatcatcattttttcaccattacttcttccatgtccaatatgatcatgtgagaatactaaaattcctaacgatgatatgttttcagctagttcgtcataacgtccagaatgtttaccagctccatgacttatgaatactaatgccttaggatatgtaataggtttccaatatttacaatatatgtaatcattgtccagattgaacatacagtttgcactcatgattcacgttatataactatcaatattaacagttcgtttgatgatcatattatttttatgttttattgataattgtaaaaacatacaattaaatcaatatagaggaaggagacggctactgtcttttgtgagatagtcatggcgactaaattagattatgaggatgctgttttttactttgtggatgatgataaaatatgtagtcgcgactccatcatcgatctaatagatgaatatattacgtggagaaatcatgttatagtgtttaacaaagatattaccagttgtggaagactgtacaaggaattgatgaagttcgatgatgtcgctatacggtactatggtattgataaaattaatgagattgtcgaagctatgagcgaaggagaccactacatcaattttacaaaagtccatgatcaggaaagtttattcgctaccataggaatatgtgctaaaatcactgaacattggggatacaaaaagatttcagaatctagattccaatcattgggaaacattacagatttgatgaccgacgataatataaacatcttgatactttttctagaaaaaaaattgaattgatgatataggggtcttcataacgcataattattacgttagcattctatatccgtgttaaaaaaaattatcctatcatgtatttgagagttttatatgtagcaaacatgatagctgtgatgccaataagctttagatattcacgcgtgctagtgttagggatggtattatctggtggtgaaatgtccgttatataatctacaaaacaatcatcgcatatagtatgcgatagtagagtaaacatttttatagtttttactggattcatacatcgtctacccaattcggttataaatgaaattgtcgccaatcttacacccaaccccttgttatccattagcatagtattaacttcgttatttatgtcataaactgtaaatgattttgtagatgccatatcatacatgatattcatgtccctattataatcattactaactttatcacaatatatgttgataatatctatatatgatctagtctttgtgggcaactgtctatacaagtcgtctaaacgttgtttactcatatagtatcgaacagccatcattacatggtcccgttccgttgatagataatcgagtatgttagtggacttgtcaaatctatataccatattttctggaagtggatatacatagtcgtgatcaacattattgctagcctcatcttctatatcctgtactataccattatctatatcatctacataatctatgatattattacacataaacatcgacaacatactattgtttattatctaagtcctgttgatccaaacccttgatctcctctatttgtactatctagagattgtacttcttccagttctggataatatatacgttgatagattagctgagctattctatctccagtatttacattaaacgtacattttccattattaataagaatgactcctatgtttcccctataatcttcgtctattacaccacctcctatatcaatgccttttagtgacagaccagacctaggagctattctaccatagcaaatcttaggcatggacatactaatatctgtcttaattaactgtctttctcctggagggatagtataatcgtaagcgctatacaaatcatatccggcagcacccggcgattgcctagtaggagatttagctctgttagtttccttaacaaatctaactggtgagttaatattcatgttgaacataaaactaatattttatttcaaaattatttaccatcccatatattccatgaataagtgtgatgattgtacacttctatagtatctatatacgattcacgataaaatcctcctatcaatagcagtttattatccactatgatcaattctggattatccctcggataaataggatcatctatcagagtccatgtattgctggattcacaataaaattccgcatttctaccaaccaagaataaccttctaccgaacactaacgcgcatgatttataatgaggataataagtggatggtccaaactgccactgatcatgattgggtagcaaatattctgtagttgtatcagtttcagaatgtcctcccattacgtatataacattgtttatggatgccactgctggattacatctaggtttcagaagactcggcatattaacccaagcagcatccccgtggaaccaacgctcaacagatgtgggatttggtagacctcctactacgtataatttattgttagcgggtatcccgctagcatacagtctggggctattcatcggaggaattggaatccaattgtttgatatataatttaccgctatagcattgttatgtatttcattgttcatccatccaccgatgagatatactacttctccaacatgagtacttgtacacatatggaatatatctataatttgatccatgttcataggatactctatgaatggatacttgtatgatttgcgtggttgtttatcacaatgaaatattttggtacagtctagtatccattttacattatttatacctctgggagaaagataatttgacctgattacatttttgataaggagtagcagatttcctaatttatttcttcgctttatataccacttaatgacaaaatcaactacataatcctcatctggaacatttagttcatcgctttctagaataagtttcatagatagataatcaaaattgtctatgatgtcatcttccagttccaaaaagtgtttggcaataaagtttttagtatgacataagagattggatagtccgtattctatacccatcatgtaacactcgacacaatattcctttctaaaatctcgtaagataaagtttatacaagtgtagatgataaattctacagaggttaatatagaagcacgtaataaattgacgacgttatgactatctatatatacctttccagtatacgagtaaataactatagaagttaaactgtgaatgtcaaggtctagacaaaccctcgtaactggatctttatttttcgtgtatttttgacgtaaatgtgtgcgaaagtaaggagataactttttcaatatcgtagaattgactattatattgcctcctatggcatcaataattgttttgaatttcttagtcatagacaatgctaatatattcttacagtacacagtattgacaaatatcggcatttatgtttctttaaaagtcaacatctagagaaaaatgattatctttttgagacataactcccattttttggtattcacccacacgtttttcgaaaaaattagtttttccttccaatgatatattttccatgaaatcaaacggattggtaacattataaatttttttaaatcccaattcagaaatcaatctatccgcgacgaattctatatatgttttcatcatttcacaattcattcctataagtttaactggaagagccgcagtaagaaattcttgttcaatggatactgcatctgttataatagatctaacggtttcttcactcggtggatgcaataaatgtttaaacatcaaacatgcgaaatcgcagtgcagaccctcgtctctactaattagttcgttggaaaacgtgagtccgggcattaggccacgctttttaagccaaaatatggaagcgaatgatccggaaaagaagattccttctactgcagcaaaggcaataagtctctctccataaccggcgctgtcatgtatccacttttgagcccaatcggccttcttttttacacaaggcatcgtttctatggcattaaagagatagtttttttcattactatctttaacataagtatcgatcaaaagactatacatttccgaatgaatgttttcaatggccatctgaaatccgtagaaacatctagcctcggtaatctgtacttctgtacaaaatcgttccgccaaattttcattcactattccgtcactggctgcaaaaaacgccaatacatgttttataaaatatttttcgtctggtgttagtttattccaatcattgatatctttagatatatctacttcttccactgtccaaaatgatgcctctgcctttttatacatgttccagatgtcataatattggattgggaaaataacaaatctatttggatttggtgcaaggatgggttccataactaaattaacaatatcaataaattttttttcagttatctatatgcctgtacttggattttttgtacatcgatatcgccgcaatcactacaataattacaagtattattgatagcattgttattagtactatcataattaaattatctacattcatgggtgctgaataatcgttattatcatcattatcattttgtaattgtgacatcatactagataaatcgtttgcgagattgttgtgggaagcgggcatggaggatgcattatcattattatttaacgccttccatttggattcacaaatgttacgcacattcaacattttatggaaactataattttgtgaaaacaaataacaagaaaactcgtcatcgttcaaatttttaacgatagtaaaccgattaaacgtcgagctaatttctaacgctagcgactctgttggatatgggtttccagatatatatcttttcagttcccctacgtatctataatcatctgtaggaaatggaagatatttccatttatctactgttcctaatatcatatgtggtggtgtagtagaaccattaagcgcgaaagatgttatttcgcatcgtattttaacttcgcaataatttctggttagataacgcactctaccagtcaagtcaatgatattagcctttacagatatattcatagtagtcgtaacgatgactccatcttttagatgcgatactcctttgtatgtaccagaatcttcgtacctcaaactcgatatatttaaacaagttaatgagatattaacgcgttttatgaatgatgatatataaccagaagttttatcctcggtggctagcgctataaccttatcattataataccaactagtgtgattaatatgtgacacgtcagtgtgggtacaaatatgtacattatcgtctacgtcgtattcgatacatccgcatacagccaacaaatataaaatgacaaatactctaacgccgttcgtacccatcttgatgcggtttaataaatgttttgatttcaatttattgtaaaaaaagattcggttttatactgttcgatattctcattgcttatattttcatctatcatctccacacagtcaaatccgtggttagcatgcacctcatcaaccggtaaaagactatcggactcttctatcattataactctagaatatttaatttggtcattattaatcaagtcaattatcttatttttaacaaacgtgagtattttactcattttttataaaaacttttagaaatatacagactctatcgtgtgtctatatcttctttttatatccaatgtatttatgtctgatttttcttcatttatcatatataatggtccaaattctacacgtgcttcggattcatccagatcattaaggttcttataattgtaacatccttctcttccctcttctacatcttccttcttattcttattcttagcgtcacagaatctaccacagcaggatcccatgacgagcgtcatattaaactaatccattttcaattataatatatgattagtaatgaccattaaaataaaaaatattcttcataaccggcaagaaagtgaaaagttcacattgaaactatgtcagtagtatacatcatgaaatgatgatatatatatactctattttggtggaggattatatgatataattcgtggataatcatttttaagacacatttctttattcgtaaatcttttcacgttaaatgagtgtccatattttgcaatttcttcatatgatggcggtgtacgtggacgaggctgctcctgttcttgttgtggtcgccgactgtcgtgtctgcgtttagatccctccattatcgcgattgcgtagatggagtactattttataccttgtaattaaatttttttattaattaaacgtataaaaacgttccgtatctgtatttaagagccagatttcgtctaatagaacaaatagctacagtaaaaataactagaataattgctacacccactagaaaccacggatcgtaatacggcaatcggttttcgataataggtggaacgtatattttatttaaggacttaacaattgtctgtaaaccacaatttgcttccgcggatcctgtattaactatctgtaaaagcatatgttgaccgggcggagccgaacattctccgatatctaatttctgtatatctataatattattaacctccgcatacgcattacagttcttttctagcttggataccgcactaggtacatcgtctagatctattcctatttcctcagcgatagctcttctatccttttccggaagcaatgaaatcacttcaataaatgattcaaccatgagtgtgaaactaagtcgagaattactcatgcatttgttagttattcggagcgcgcaatttttaaactgtcctataacctctcctatatgaatagcacaagtgacattagtagggatagaatgttgagctaatttttgtaaataactatctataaaaagattatacaaagttttaaactctttagtttccgccatttatccagtctgagaaaatgtctctcataataaatttttccaagaaactaattgggtgaagaatggaaacctttaatctatatttatcacagtctgttttggtacacatgatgaattcttccaatgccgtactaaattcgatatctttttcgatttctggatatgtttttaataaagtatgaacaaagaaatggaaatcgtaataccagttatgtttaactttgaaattgttttttattttcttgttaatgattccagccacttgggaaaagtcaaagtcgtttaatgccgatttaatacgttcattaaaaacaaactttttatcctttagatgaattattattggttcattggaatcaaaaagtaagatattatcgggtttaagatctgcgtgtaaaaagttgtcgcaacagggtagttcgtagattttaatgtataacagagccatctgtaaaaagataaactttatgtattgtaccaaagatttaaatcctaatttgatagctaactcggtatctactttatctgccgaatacagtgctaggggaaaaattataatgtttcctctttcatattcgtagttagttctcttttcatgttcgaaaaagtgaaacatgcggttaaaatagtttataacattaatattactgttaataactgccggataaaagtgggatagtaatttcacgaatttgatactgtcctttctctcgttaaacgcctttaaaaaaactttagaagaatatctcaatgagagttcctgaccatccatagtttgtatcaataatagcaacatatgaagaacacgtttatacagagtatgtaaaaatgttaatttatagtttaatcccatggcccacgcacacacgattaattttttttcatctccctttagattgttgtatagaaatttgggtactgtgaactccgccgtagtttccatgggactatataattttgtggcctcgaatacaaattttactacatagttatctatcttaaagactataccatatcctcctgtagatatgtgataaaaatcgtcgtttataggataaaatcgtttatccttttgttggaaaaaggatgaattaatgtaatcattctcttctatctttagtagtgtttccttattaaaattcttaaaataatttaacaatctaactgacggagcccaattttggtgtaaatctaattgggacattatattgttaaaatacaaacagtctcctaatataacagtatctgataatctatggggagacatccattgatattcaggggatgaatcattggcaacacccatttattgtacaaaaagccccaatttacaaacgaaagtccaggtttgatagagacaaacaattaactattttgtctctgtttttaacacctccacagtttttaatttctttagtaatgaaattattcacaatatcagtatcttctttatctaccagagattttactaacttgataaccttggctgtctcattcaatagggtagtaatatttgtatgtgtgatattgatatctttttgaattgtttcttttagaagtgattctttgatggtgccagcatacgaattacaataatgcagaaactcggttaacatgcaggaattatagtaagccaattccaattgttgcctgtgttgtattagagtgtcaatatgagcaatggtgtccttgcgtttctctgatagaatgcgagcagcgattttggcgttatcatttgacgatatttctggaatgacgaatcctgtttctactaactttttggtaggacaaagtgaaacaatcaagaagatagcttctcctcctatttgtggaagaaattgaactcctctagatgatctactgacgatagtatctccttgacagatattggaccgaattacagaagtacctggaatgtaaagccctgaaaccccctcattttttaagcagattgttgccgtaaatcctgcactatgcccaagatagagagctcctttggtgaatccatctctatgtttcagtttaaccaagaaacagtcagctggtctaaaatttccatctctatctaatacagcatctaacttgatgtcaggaactatgaccggtttaatgttatatgtaacattgagtaaatccttaagttcataatcatcactgtcatcagttatgtacgatccaaacaatgtttctaccggcatagtggatacgaagatgctatccatcagaatgtttccctgattagtattttctatatagctattcttctttaaacgattttccaaatcagtaactatgttcatttttttaggagtaggacgcctagccagtatggaagaggattttctagatcctctcttcaacatctttgatctcgatggaatgcaaaaccccatagtgaaacaaccaacgataaaaataatattgtttttcactttttataattttaccatctgactcatggattcattaatatctttataagagctactaacgtataattctttataactgaactgagatatatacaccggatctatggtttccataattgagtaaatgaatgctcggcaataactaatggcaaatgtatagaacaacgaaattatactagagttgttaaagttaatattttctatgagctgttccaataaattatttgttgtgactgcgttcaagtcataaatcatcttgatactatccagtaaaccgtttttaagttctggaatattatcatcccattgtaaagcccctaattcgactatcgaatatcctgctctgatagcagtttcaatatcgacggacgtcaatactgtaataaaggtggtagtattgtcatcatcgtgataaactacgggaatatggtcgttagtaggtacggtaactttacacaacgcgatatataactttccttttgtaccatttttaacgtagttgggacgtcctgcagggtattgttttgaagaaatgatatcgagaacagatttgatacgatatttgttggattcctgattattcactataatataatctagacagatagatgattcgataaatagagaaggtatatcgttggtaggataatacatccccattccagtattctcggatactctattgatgacactagttaagaacatgtcttctattctagaaaacgaaaacatcctacatggactcattaaaacttctaacgctcctgattgtgtctcgaatgcctcgtacaaggatttcaaggatgccatagattctttgaccaacgatttagaattgcgtttagcatctgatttttttattaaatcgaatggtcggctctctggtttgctaccccaatgataacaatagtcttgtaaagataaaccgcaagaaaatttatacgcatccatccaaataaccctagcaccatcggatgatattaatgtattattatagattttccatccacaattattgggccagtatactgttagcaacggtatatcgaatagattactcatgtaacctactagaatgatagttcgtgtactagtcataatatctttaatccaatctaaaaaatttaaaattagattttttacactgttaaagttaacaaaagtattacccgggtacgtggatatcatatatggcattggtccattatcagtaatagctccataaactgatacggcgatggtttttatatgtgtttgatctaacgaggaagaaattcgcgcccacaattcatctctagatatgtatttaatatcaaacggtaacacatcaatttcgggacgcgtatatgtttctaaatttttaatccaaatataatgatgacctatatgccctattatcatactgtcaactatagtacacctagggaacttacgatacatctgtttcctataatcgttaaattttacaaatctataacatgctaaaccttttgacgacagccattcattaatttctgatatggaatctgtattctcgataccgtatcgttctaaagccagtgctatatctccctgttcgtgggaacgctttcgtataatatcgatcaacggataatctgaagtttttggagaataatatgactcatgatctatttcgtccataaacaatctagacataggaattggaggcgatgatcttaattttgtgcaatgagtcgtcaatcctataacttctaatcttgtaatattcatcatcgacataatactatctatgttatcatcgtatattagtataccatgaccttcttcatttcgtgccaaaatgatatacagtcttaaatagttacgcaatatctcaatagtttcataattgttagctgttttcatcaaggtttgtatcctgtttaacatgatggcgttctataacgtctctattttctatttttaattttttaaatttttaacgatttactgtggctagatacccaatctctctcaaatatttttttagcctcgcttacaagctgtttatctatactattaaaactgacgaatccgtgattttggtaatgggttccgtcgaaatttgccgaagtgatatgaacatattcgtcgtcgactatcaacaattttgtattattctgaatagtgaaaaccttcacagatagatcattttgaacacacaacgcatctagacttttggcggttgccatagaatatacgtcgttcttatcccaattaccaactagaagtctgatcttaactcctctattaatggctgcttctataatggagttgtaaatgtcgggccaatagtagctattaccgtcgacacgtgtagtgggaactatggccaaatgttcaatatctatactagtcttagctgacctgagtttatcaataactacatcggtatctagatctctagaatatcccaataggtgttccggagaatcagtaaagaacactccacctataggattcttaatatgatacgcagtgctaactggcaaacaacaagccgcagagcataaattcaaccatgaattttttgcgctattaaaggctttaaaagtatcaaatcttctacgaagatctgtggccagcgggggataatcagaatatacacctaacgttttaatcgtatgtatagatcctccagtaaatgacgcgtttcctacataacatctttcatcatctgacacccaaaaacaaccgagtagtagtcccacattattttttttatctatattaacggttataaaatttatatccgggcagtgactttgtagctctcccagatttcttttccctcgttcatctagcaaaactattattttaatcccttttttagatgcctcttttagtttatcaaaaataagcgctcccctagtcgtactcagaggattacaacaaaaagatgctatgtatatatatttcttagctagagtgataatttcgttaaaacattcaaatgttgttaaatgatcggatctaaaatccatattttctggtagtgtttctaccagcctacattttgctcccgcaggtaccgatgcaaatggccacatttagttaacataaaaacttatacatcctgttctatcaacgattctagaatatcatcggctatatcgctaaaattttcatcaaagtcgacatcacaacctaactcagtcaatatattaagaagttccatgatgtcatcttcgtctatttctatatccgtatccattgtagattgttgaccgattatcgagtttaaatcattactaatactcaatccttcagaatacaatctgtatttcattgtaaatttataggcggtgtatttaagttggtagattttcaattatgtatcaatatagcaacagtagttcttgctcctccttgattctagcatcctcttcattattttcttctacgtacataaacatgtccaatacgttagacaacacaccgacgatggcggccgctacagacacgaatatgactagaccgatgaccatttaaaaacccctctctagctttcacttaaactgtatcgatcattcttttagcacatgtataatataaaaacattattctatttcgaatttaggcttccaaaaatttttcatccgtaaaccgataataatatatatagacttgttaatagtcggaataaatagattaatgcttaaactatcatcatctccacgattagagatacaatatttacattctttttgctgtttcgaaactttatcaatacacgttaatacaaacccaggaaggagatattgaaactgaggctgttgaaaatgaaacggtgaatacaataattcagataatgtaaaatcatgattccgtattctgatgatattagaactgctaatggatgtcgatggtatgtatctaggagtatctattttaacaaagcatcgatttgctaatatacaattatcattttgattaattgttattttattcatattcttaaaaggtttcatatttatcaattcttctacattaaaaatttccatttttaatttatgtagccccgcaatactcctcattacgtttcattttttgtctataatatccattttgttcatctcggtacatagattatccaattgagaagcgcatttagtagttttgtacattttaagtttattgacgaatcgtcgaaaactagttatagttaacattttattatttgataccctgatattaatacccctgccgttactattatttataactgatgtaacccacgtaacattagaattaattatcgatagtaatgcatcaacgcttccaaaattgtctattataaactcaccgataatttttttattgcatgttttcatattcattaggattatcaaatctttaatcttattacgattgtatgcgttgatattacaagacgtcattctaaaagacggaggatttccatcaaatgccagacaatcacgtacaaagtacatggaaataggttttgttctattgcgcatcatagatttatatagaacacccgtagaaatactaatttgttttactctataaaatactaatgcatctatttcatcgttttgtataacgtctttccaagtgtcaaattccaaatttttttcattgatagtaccaaattcttctatctctttaactacttgcatagataggtaattacagtgatgcctacatgccgttttttgaaactgaatagatgcgtctagaagcgatgctacgctagtcacaatcaccactttcatatttagaatatatatatgtaaaaatatagtagaatttcattttgttttttctatgctataaatgaattctcattttgcatctgctcatactccgttttatatcaataccaaagaaggaagatatctggttctaaaagccgttaaagtatgcgatgttagaactgtagaatgcgaaggaagtaaagcttcctgcgtactcaaagtagataaaccctcatcacccgcgtgtgagagaagaccttcgtccccgtccagatgcgagagaatgaataaccctggaaaacaagttccgtttatgagaacggacatgctacaaaatatgttcgcggctaatcgcgataatgtagcttctagacttttgtcctaaaatacaattatatccttttcgatattaataaatccgtgtcgtccaggttttttatctctttcagtatgtgaatagataggtattttatctctattcatcatcgaatttaagagatccgataaacattgtttgtattctccagatgtcagcatctgatacaacaatatatgtgcacataaacctctggcacttatttcatgtaccttccccttatcactaaggagaatagtatttgagaaatatgtatacatgatattatcatgaattagatatacagaatttgtaacactctcgaaatcacacgatgtgtcggcgttaagatctaatatatcactcgataacacattttcatctagatacactagacattttttaaagctaaaatagtctttagtagtaacagtaactatgcgattattttcatcgatgatacatttcatcggcatattattacgcttaccatcaaagactataccatgtgtatatctaacgtattctagcatggttgccatacgcgcattaaacttttcaggatctttggatagatcttccaatctatctatttgagaaaacatttttatcatgttcaatagttgaaacgtcggatccactatatagatattatctataaagattttaggaactacgttcatggtatcctggcgaatattaaaactatcaatgatatgattatcgttttcatcttttatcaccatatagtttctaagatatgggattttacttaatataatattatttcccgtgataaattttattagaaaggccaaatctataagaaaagtcctagaattagtctgaagaatatctatatcgccgtatagtatatttggattaattagatatagagaatatgatccgtaacatatacaacttttattatggcgtctaagatattcttccatcaacttattaacatttttgactagggaagatacattatgacgtcccattacttttgccttgtctattactgcgacgttcatagaatttagcatatctcttgccaattcttccattgatgttacattataagaaattttagatgaaattacatttggagctttaatagtaagaactcctaatatgtccgtgtatgtggtcactaatacagattgtagttctataatcgtaaataatttacctatattatatgtttgagtctgtttagaaaagtagctaagtatacgatcttttatttctgatgcagatgtattaacatcggaaaaaaatctttttttattcttttttactaaagatacaaatatgtctttgttaaaaacagttattttctgaatatttctagcttgtaattttaacatatgatattcgttcacactaggtactctgcctaaataggtttctataatctttaatgtaatattaggaaaagtattctgatcaggattcctattcattttgaggatttaaaactctgattattgtctaatatggtctctacgcaaactttttcacagagcgatagagtttttgataactcgtttttcttaagaaatataaaactactgtttccagagctcgctctatcttttattttatctaattcgatacaaactcctgatactggttcagaaagtaattcattaattttcagtcctttatagaagatatttaatatagataatacaaaatcttcagtttttgatatcgatctgattgatcctagaactagatatattaataacgtgctcattaggcagtttatggcagcttgataattagatatagtatattccagttcatatttattagataccgcattgcccagattttgatattctatgaattcctctgaaaataaatccaaaataactagacattctattttttgtggattagtgtactctcttccctctatcatgttcactactggtgtccacgatgataaatatctagagggaatataatatagtccataggatgccaatctagcaatgtcgaataactgtaatttgattcttcgttcttcattatgaattgattcttgaggtataaacctaacacaaattatattattagacttttcgtatgtaatgtctttcatgttataagtttttaatcctggaatagaatctattttaatgaggcttttaaacgcagagttctccaacgagtcaaagcataatactctgttgtttttcttatatacgatgttacgattttcttctttgaatggaataggtttttgaattagtttataattacaacataatagataaggaagtgtgcaaatagtacgcggaaaaaacataatagctcccctgttttcatccatggttttaagtaaatgatcactggcttctttagtcaatggatattcgaacattaaccgtttcatcatcattggacagaatccatattttttaatgtaaagagtgatcaaatcattgtgtttattgtaccatcttgttgtaaatgtgtattcggttatcggatctgctcctttttctattaaagtatcgatgtcgatctcgtctaagaattcaactatatcgacatatttcatttgtatacacataaccattactaacgtagaatgtataggaagagatgtaacgggaacagggtttgttgattcgcaaactattctaatacataattcttctgttaatacgtcttgcacgtaatctattatagatgccaagatatctatataattattttgtaagatgatgttaactatgtgatctatataagtagtgtaataattcatgtatttcgatatatgttccaactctgtctttgtgatgtctagtttcgtaatatctatagcatcctcaaaaaatatattcgcatatattcccaagtcttcagttctatcttctaaaaaatcttcaacgtatggaatataataatctattttacctcttctgatatcattaatgatataatttttgacactatcttctgtcaattgattcttattcactatatctaagaaacggatagcgtccctaggacgaactactgccattaatatctctattatagcttctggacataattcatctattataccagaattaatgggaactattccgtatctatctaacatagttttaagaaagtcagaatctaagacctgatgttcatatattggttcatacatgaaatgatctctattgatgatagtgactatttcattctctgaaaattggtaactcattctatatatgctttccttgttgatgaaggatagaatatactcaatagaatttgtaccaacaaactgttctcttatgaatcgtatatcatcatctgaaataatcatgtaaggcatacatttaacaattagagacttgtctcctgttatcaatatactattcttgtgataatttatgtgtgaggcaaatttgtccacgttctttaattttgttatagtagatatcaaatccaatggagctacagttcttggcttaaacagatatagtttttctggaacaaattctacaacattattataaaggactttgggtagataagtgggatgaaatcctattttaattaatgcgatagccttgtcctcgtgcagatatccaaacgcttttgtgatagtatggcattcattgtctagaaacgctctacgaatatctgtgacagatatcatctttagagaatatactagtcgcgttaatagtactacaatttgtattttttaatctatctcaataaaaaaattaatatgtatgattcaatgtataactaaactactaactgttattgataactagaatcagaatctaatgatgacgtacccaagaagtttatctactgccaatttagctgcattatttttagcatctcgtttagattttccatctgccttatcgaatactcttccgtcgatatctacacaggcataaaatgtaggagagttactaggcccaactgattcaatacgaaaagaccaatctctcttagttatttggcagtactcattaataacggtgacagggttagcatctttccaatcaataatttttttagccggaataacatcatcaaaagacttatgatcctctctcattgatttttcgcgggatacatcatctattatgacgtcagccataacatcagcatccggcttatccgcctccgttgtcataaaccaacgaggaggaatatcgtcggagctgtacaccatagcactacgttgaagatcgtacagagctttattaacttctcgcttctccatattaagttgtctagttagttgtgcagcagtagctccttcgattccaatggttttaatagcctcacacacaatctctgcgttagaacgttcgtcgatatagattttagacatttttagagagaactaacacaaccagcaataaaactgaacctactttatcatttttttattcatcatcctctggtggttcgtcgttcctatcaaatgtagctctgattaacccgtcatctataggtgatgctggttctggagattctggaggagatggattattatctggaagaatctctgttatttccttgttttcatgtatcgattgcgttgtaacattaagattgcgaaatgctctaaatttgggaggcttaaagtgttgtttgcaatctctacacgcgtgtctaactagtggaggttcgtcagctgctctagtttgaatcatcatcggcgtagtattcctacttttacagttaggacacggtgtattgtatttctcgtcgagaacgttaaaataatcgttgtaactcacatcctttattttatctatattgtattctactcctttcttaatgcattttataccgaataagagatagcgaaggaattctttttcggtgccgctagtacccttaatcatatcacatagtgttttatattccaaatttgtggcaatagacggtttatttctatacgatagtttgtttctggaatcctttgagtattctataccaatattattctttgattcgaatttagtttcttcgatattagattttgtattacctatattcttgatgtagtactttgatgatttttccatggcccattctattaagtcttccaagttggcatcatccacatattgtgatagtaattctcggatatcagtagcggctaccgccattgatgtttgttcattggatgagtaactactaatgtatacattttccatttataacacttatgtattaactttgttcatttatattttttcattattatgttgatattaacaaaagtgaatatatatatatgttaataattgtattgtggttatacggctacaattttataatgagtgaaagtcagtgtccgatgatcaatgacgatagctttactctgaaaagaaagtatcaaatcgatagtgcggagtcaacaataaaaatggataagaagaggataaagtttcagaatagagccaaaatggtaaaagaaataaatcagacaataagagcagcacaaactcattacgagacattgaaactaggatacataaaatttaagagaatgattaggactactactctagaagatatagcaccatctattccaaataatcagaaaacttataaactattctcggacatttcagccatcggcaaagcatcacagaatccgagtaagatggtatatgctctgctgctttacatgtttcccaatttgtttggagatgatcatagattcattcgttatagaatgcatccaatgagtaaaatcaaacacaagatcttctctcctttcaaacttaatcttattagaatattagtggaagaaagattctataataatgaatgcagatctaataaatggaaaataattggaacacaagttgataaaatgttgatagctgaatctgataaatatacaatagatgcaaggtataacctaaaacccatgtatagaatcaagggagaatctgaagaagataccctcttcatcaaacagatggtagaacaatgtgtgacatcccaggaattggtggaaaaagtgttgaagatactgtttagagatttgttcaagagtggagaatacaaagcgtacagatacgatgatgatgtagaaaatggattcattggattggatacactaaaattaaacattgttcatgatatagttgaaccatgtatgcctgttcgtaggccagtggctaagatactgtgtaaagaaatggtaaataaatactttgagaatccgctacatattattggtaaaaatcttcaagagtgcattgactttgttagtgaataggcatttcatctttctccaatactaattcaaattgttaaattaataatggatagtataaatagttattagttataagatagtaaaaataattattagaataagagtgtagtatcatagataactctcttctataaaaatggattttattcgtagaaagtatcttatatacacagtagaaaataatatagattttttaaaggatgatacattaagtaaagtaaacaattttaccctcaatcatgtactagctctcaagtatctagttagcaattttcctcaacatgttattactaaggatgtattagctaataccaatttttttgttttcatacatatggtacgatgttgtaaagtgtacgaagcggttttacgacacgcatttgatgcacccacgttgtacgttaaagcattgactaagaattatttatcgtttagtaacgcaatacaatcgtacaaggaaaccgtgcataaactaacacaagatgaaaaatttttagaggttgccgaatacatggacgaattaggagaacttataggcgtaaattatgacttagttcttaatccattatttcacggaggggaacccatcaaagatatggaaatcatttttttaaaactgtttaagaaaacagacttcaaagttgttaaaaaattaagtgttataagattacttatttgggcatacctaagcaagaaagatacaggcatagagtttgcggataatgatagacaagatatatatactctatttcaacaaactggtagaatcgtccatagcaatctaacagaaacgtttagagattatatctttcccggagataagactagctattgggtgtggttaaacgaaagtatagctaatgatgcggatatcgttcttaatagacccgccattaccatgtatgataaaattcttagttatatatactctgagataaaacaaggacgcgttaataaaaacatgcttaagttagtttatatctttgagcctgaaaaagatatcagagaacttctgctagaaatcatatatgatattcctggagatatcctatctattattgatgcaaaaaacgacgattggaaaaaatattttattagtttttataaagctaattttattaacggtaatacatttattagtgatagaacgtttaacgaggacttattcagagttgttgttcaaatagatcccgaatatttcgataatgaacgaattatgtctttattctctacgagtgctgcggacattaaacgatttgatgagttagatattaataacagttatatatctaatataatttatgaggtgaacgatatcacattagatacaatggatgatatgaagaagtgtcaaatctttaacgaggatacgtcgtattatgttaaggaatacaatacatacctgtttttgcacgagtcggatcccatggtcatagagaacggaatactaaagaaactgtcatctataaaatccaagagtagacggctgaacttgtttagcaaaaacattttaaaatattatttagacggacaattggctcgtctaggtcttgtgttagatgattataaaggagacttgttagttaaaatgataaaccatcttaagtctgtggaggatgtatccgcattcgttcgattttctacagataaaaaccctagtattcttccatcgctaatcaaaactattttagctagttataatatttccatcatcgtcttatttcaaaggtttttgagagataatctatatcatgtagaagaattcttggataaaagcatccatctaaccaagacggataagaaatatatacttcaattgataagacacggtagatcatagaacagaccaaatatattattaataatttgtatatacatagatataattatcacacatttttgataaatgggaactgctgcaacaattcagactcccaccaaattaatgaataaagaaaatgcagaaatgattttggaaaaaattgttgatcatatagttatgtatattagtgacgaatcaagtgattcagaaaataatcctgaatatattgattttcgtaacagatacgaagactatagatctctcattataaaaagtgatcacgagtttgtaaagctatgtaaaaatcatgcggagaaaagttctccagaaacgcaacaaatgattatcaaacacatatacgaacaatatcttattccagtatctgaagtactattaaaacctataatgtccatgggtgacataattacatataacggatgtaaagacaatgaatggatgctagaacaactctctaccctaaactttaacaatctccgcacatggaactcatgtagcataggcaatgtaacgcgtctgttttatacattttttagttatctgatgaaagataaactaaatatataagtataatcccattctaatactttaacctgatgtattagcatcttattagaatattaacctaactaaaagacataacataaaaactcattacatagttgataaaaagcggtaggatataaatattatggctgccaccgttccgcgttttgacgacgtgtacaaaaatgcacaaagaagaattctagatcaagaaacattttttagtagaggtctaagtagaccgttaatgaaaaacacatatctatttgataattacgcgtatggatggataccagaaactgcaatttggagtagtagatacgcaaacttagatgcaagtgactattatcccatttcgttgggattacttaaaaagttcgagtttctcatgtctctatataaaggtcctattccagtatacgaagaaaaagtaaatactgaattcattgctaatggatctttctccggtagatacgtatcatatcttagaaagttttctgctcttccaacaaacgagtttattagttttttgttactgacttccattccaatctataatatcttgttctggtttaaaaatactcagtttgatattactaaacacacattattcagatacgtctatacagataatgccaaacacctggcgttggctaggtatatgtatcaaacaggagactataagcctttgtttagtcgtctcaaagagaattatatatttaccggtcccgttccaatatgtatcaaagatatagatcaccctaatcttagtagagcaagaagtccatccgattatgagacattagctaatattagtactatattgtactttaccaagtatgatccggtattaatgtttttattgttttacgtacctgggtattcaattactacaaaaattactccagccgtagaatatctaatggataaactgaatctaacaaagagcgacgtacaactgttgtaaattattttatgcttcgtaaaatgtaggttttgaaccaaacattctttcaaagaatgagatgcataaaactttattatccaatagattgactatttcggacgtcaatcgtttaaagtaaacttcgtaaaatattctttgatcactgccgagtttaaaacttctatcgataattgtctcatatgttttaatatttacaagttttttggtccatggtacattagccggacaaatatatgcaaaataatatcgttctccaagttctatagtttctggattatttttattatattcagtaaccaaatacatattagggttatctgcggatttataatttgagtgatgcattcgactcaacataaataattctagaggagacgatctactatcaaattcggatcgtaaatctgtttctaaagaacggagaatatctatacatacctgattagaattcatccgtccttcagacaacatctcagacagtctggtcttgtatgtcttaatcatattcttatgaaacttggaaacatctcttctagtttcactagtacctttattaattctctcaggtacagattttgaattcgacgatgccgagtatttcatcgttgtatatttcttcttcgattgcataatcagattcttatataccgcttcaaactctattttaaaattattaaacaatactctattattaatcagtcgttctaactctttcgctatttctatagacttatcgacatcttgactgtctatctctgtaaacacggagtcggtatctccatacacgctacgaaaacgaaatctgtaatctataggcaacgatgttttcacaatcggattaatatctctatcgtccatataaaatggattacttaatggattggcaaaccgtaacataccgttagataactctgctccatttagtaccgattctagatacaagatcattctacgtcctatggatgtgcaactcttagccgaagcgtatgagtatagagcactatttctaaatcccatcagaccatatactgagttggctactatcttgtacgtatattgcatggaatcatagatggccttttcagttgaactggtagcctgttttagcatctttttatatctggctctctctgccaaaaatgttcttaatagtctaggaatggttccttctatcgatctatcgaaaattgctatttcagagatgaggttcggtagtctaggttcacaatgaaccgtaatatatctaggaggtggatatttctgaagcaatagctgattatttatttcttcttccaatctattggtactaacaacgacaccgactaatgtttccggagatagatttccaaagatacacacattaggatacagactgttataatcaaagattaatacattattactaaacattttttgttttggagcaaataccttaccgccttcataaggaaacttttgttttgtttctgatctaactaagatagttttagtttccaacaatagctttaacagtggacccttgatgactgtactcgctctatattcgaataccatggattgaggaagcacatatgttgacgcacccgcgtctgtttttgtttctactccataatactcccacaaatactgacacaaacaagcatcatgaatacagtatctagccatatctaaagctatgtttagattataatccttatacatctgagctaaatcaacgtcatcctttccgaaagataatttatatgtatcattaggtaaagtaggacataatagtacgactttaaatccattttcccaaatatctttacgaattactttacatataatatcctcatcaacagtcacataattacctgtggttaaaacctttgcaaatgcagcggctttgcctttcgcgtctgtagtatcgtcaccgatgaacgtcatttctctaactcctctatttaatactttacccatgcaactgaacgcgttcttggatatagaatccaatttgtacgaatccaatttttcaaatttttgaatgaatgaatatagatcgaaaaatatagttccattattgttattaacgtgaaacgtagtattggccatgccgcctactcccttatgactagactgatttctctcataaatacagagatgtacagcttcctttttgtccggagatctaaagataatcttctctcctgttaataactctagacgattagtaatatatctcagatcaaagttatgtccgttaaaggtaacgacgtagtcgaacgttagttccaacaattgtttagctattcgtaacaaaactatttcagaacatagaactagttctcgttcgtaatccatttccattagtgactgtatcctcaaacatcctctatcgacggcttcttgtatttcctgttccgttaacatctcttcattaatgagcgtaaacaataatcgtttaccacttaaatcgatataacagtaacttgtatgcgagattgggttaataaatacagaaggaaacttcttatcgaagtgacactctatatctagaaataagtacgatcttgggatatcgaatctaggtatttttttagcgaaacagttacgtggatcgtcacaatgataacatccattgttaatctttgtcaaatattgctcgtccaacgagtaacatccgtctggagatatcccgttagaaatataaaaccaactaatattgagaaattcatccatggtggcattttgtatgctgcgtttctttggctcttctatcaaccacatatctgcgacggagcattttctatctttaatatctagattataacttattgtctcgtcaatgtctatagttctcatctttcccaacggcctcgcattaaatggaggaggagacaatgactgatatatttcgtccgtcactacgtaataaaagtaatgaggaaatcgtataaatacggtctcaccatttcgacatctggatttcagatataaaaatctgttttcaccgtgactttcaaaccaattaatgcaccgaacatccatttatagaatttagaaatatattttcatttaaatgaatcccaaacattggggaagagccgtatggaccattatttttatagtactttcgcaagcgggtttagacggcaacatagaagcgtgtaaacgaaaactatatactatagttagcactcttccatgtcctgcatgtagacggcacgcgactatcgctatagaggacaataatgtcatgtctagcgatgatctgaattatatttattattttttcatcagattatttaacaatttggcatctgatcccaaatacgcgatcgatgtgacaaaggttaaccctttataaacttaacccattataaaacttatgattagtcacaactgaaataaccgcgtgattattttttggtataattctacacggcatggtttctgtgactatgaattcaacccccgttacattagtgaaatctttaacaaacagcaagggttcgtcaaagacataaaactcattgtttacaatcgaaatagaccccctatcacacttaaaataaaaaatatccttatcctttaccaccaaataaaattctgattggtcaatgtgaatgtattcacttaacagttccacaaatttatttattaactccgaggcacatacatcgtcggtattttttatggcaaactttactcttccagcatccgtttctaaaaaaatattaacgagttccatttatatcatccaatattattgaaatgacgttgatggacagatgatacaaataagaaggtacggtacctttgtccaccatctcctccaattcatgctctattttgtcattaactttaatgtatgaaaacagtacgccacatgcttccatgacagtgtgtaacactttggatacaaaatgtttgacattagtataattgttcaagactgtcaatctataatagatagtagctataatatattctatgatggtattgaagaagatgacaaccttggcatattgatcatttaacacagacatggtatcaacagatagcttgaatgaaagagaatcagtaattggaataagcgtcttctcgatagagtgtccgtataccaacatgtctgatattttgatgtattccattaaattatttagttttttctttttattctcgttaaacagcatttctgtcaacggaccccaacatcgttgaccgattaagttttgattgatttttccgtgtaaggcgtatctagtcagatcgtatagcctatccaataatccatcatctgtgcgtagatcacatcgtacactttttaattctctatagaagagcgacagacatctggagcaattacagacagcaatttctttattctctacagatgtaagatacttgaagacattcctatgatgatgcagaattttggataacacggtattgatggtatctgttaccataattcctttgatggctgatagtgtcagagcacaagatttccaatctttgacaatttttagcaccattatctttgttttgatatctatatcagacagcatggtgcgtctgacaacacagggattaagacggaaagatgaaatgattctctcaacatcttcaatagataccttgctattttttctggcattatctatatgtgcgagaatatcctctagagaatcagtatcctttttgatgatagtggatctcaatgacatgggacgtttaaaccttcttattctatcaccagattgcatggtgatttgtcttctttcttttatcataatgtaatctctaaattcatcggcaaattgtctatatctaaaatcataatatgagatgtttacctctacaaatatctgttcgtccaatgttagagtatttacatcagttttgtattccaaattaaacatggcaacggatttaattttatattcctctattaagtcctcgtcgataataacagaatgtagataatcatttaatccatcgtacatggttggaagatgcttgttgacaaaatctttaattgtcttgatgaaggtgggactatatctaacatcttgattaataaaatttataacattgtccataggatactttgtaactagttttatacacatctcttcatcggtaagtttagacagaatatcgtgaacaggtggtatattatattcatcagatatacgaagaacaatgtccaaatctatattgtttaatatattatatagatgtagcgtagctcctacaggaatatctttaactaagtcaatgatttcatcaaccgttagatctattttaaagttaatcatataggcattgatttttaaaaggtatgtagccttgactacattctcattaattaaccattccaagtcactgtgtgtaagaagattatattctatcataagcttgactacatttggtcccgataccattaaagaattcttatgatataaggaaacagcttttaggtactcatctactctacaagaattttggagagccttaacgatatcagtgacgtttattatttcaggaggaaaaaacctaacattgagaatatcggaattaatagcttccagatacagtgattttggcaatagtccgtgtaatccataatccagtaacacgagctggtgcttgctagacaccttttcaatgtttaatttttttgaaataagctttgataaagccttcctcgcaaattccggatacatgaacatgtcggcgacatgattaagtattgttttttcattatttttatattttctcaacaagttctcaataccccaatagatgatagaatatcacccaatgcgtccatgttgtctatttccaacaggtcgctatatccaccaatagaagtttttccaaaaaagattctaggaacagttctaccaccagtaatttgttcaaaatagtcacgcaattcattttcgggtttaaattctttaatatcgacaatttcatacgctcctcttttgaaactaaacttatttagaatatccagtgcatttctacaaaaaggacatgtatacttgacaaaaattgtcactttgttattggccaacctttgttgtacaaattcctcggccattttaatatttaagtgatataaaactatctcgacttatttaactctttagtcgagatatatggacgcagatagctatatgatagccaactacagaaggcaaacgctataaaaaacataattacgacgagcatatttataaatatttttattcagcattacttgatatagtaatattaggcacagtcaaacattcaaccactctcgatacattaactctctcattttctttaacaaattctgcaatatcttcgtaaaaagattcttgaaactttttagaatatctatcgactctagatgaaatagcgttcgtcaacatactatgttttgtatacataaaggcgcccattttaacagtttctagtgacaaaatgctagcgatcctaggatcctttagaatcacatagattgacgattcgtctctcttagtaactctagtaaaataatcatacaatctagtacgcgaaataatattatccttgacttgaggagatctaaacaatctagttttgagaacatcgataagttcatcgggaatgacatacatactatctttaatagaactcttttcatccagttgaatggattcgtccttaaccaactgattaatgagatcttctattttatcattttccagatgatatgtatgtccattaaagttaaattgtgtagcgcttctttttagtctagcagccaatactttaacatcactaatatcgatatacaaaggagatgatttatctatggtattaagaattcgtttttcgacatccgtcaaaaccaattcctttttgcctgtatcatccagttttccatcctttgtaaagaaattattttctactagactattaataagactgataaggattcctccataattgcacaatccaaactttttcacaaaactagactttacaagatctacaggaatgcgtacttcaggttttttagcttgtgattttttcttttgcggacattttcttgtgaccaactcatctaccatttcattgattttagcagtgaaataagctttcaatgcacgggcactgatactattgaaaacgagttgatcttcaaattccgccatttaagttcaccaaacaacttttaaatacaaatatatcaatagtagtagaataagaactataaaaaaaataataattaaccaataccaaccccaacaaccggtattattagttgatgtgactgttttctcatcacttagaacagatttaacaatttctataaagtctgtcaaatcatcttccggagaccccataaatacaccaaatatagcggcgtacaacttatccatttatacattgaatattggcttttctttatcgctatcttcatcatattcatcatcaatatcaacaagtcccagattacgagccagatcttcttctacattttcagtcattgatacacgttcactatctccagagagtccgataacgttagccaccacttctctatcaatgattagtttcttgagcgcgaaagtaatttttgtttccgttccggatctatagaagacgataggtgtgataattgccttggccaattgtctttctcttttactgagtgattctagttcaccttctatagatctgagaatggatgattctccagtcgaaacatattctaccatggatccgtttaatttgttgatgaagatggattcatccttaaatgttttctctgtaatagtttccaccgaaagactatgcaaagaatttggaatgcgttccttgtgcttaatgtttccatagacggcttctagaagttgatacaacataggactagccgcggtaacttttatttttagaaagtatccatcgcttctatcttgtttagatttatttttataaagtttagtctctccttccaacataataaaagtggaagtcatttgactagataaactatcagtaagttttatagagatagacgaacaattagcgtattgagaagcatttagtgtaacgtattcgatacattttgcattagatttactaatcgattttgcatactctataacacccgcacaagtctgtagagaatcgctagatgcagtaggtcttggtgaagtttcaactctcttcttgattaccttactcatgattaaacctaaataattgtactttgtaatataatgatatatattttcactttatctcatttgagaataaaaatgtttttgtttaaccactgcatgatgtacagatttcggaatcgcaaaccaccagtggttttattttatccttgtccaatgtgaattgaatgggagcggatgcgggtttcgtacgtagatagtacattcccgtttttagaccgagactccatccgtaaaaatgcatactcgttagtttggaataactcggatctgctatatggatattcatagattgactttgatcgatgaaggctcccctgtctgcagccatttttatgatcgtcttttgtggaatttcccaaatagttttataaactcgcttaatatcttctggaaggtttgtattctgaatggatccaccatctgccataatcctattcttgatctcatcattccataattttctctcggttaaaactctaaggagatgcggattaactacttgaaattctccagacaatactctccgagtgtaaatattactggtatacggttccaccgactcattatttcccaaaatttgagcagttgatgcagtcggcataggtgccaccaataaactatttctaagaccgtatgttctgattttatcttttagaggttcccaattccaaagatccgacggtacaacattccaaagatcatattgtagaataccgttactggcgtacgatcctacatatgtatcgtatggtccttccttctcagctagttcacaactcgcctctaatgcaccgtaataaatggtttcgaagatcttcttatttagatcttgtgcttccaggctatcaaatggataatttaagagaataaacgcgtccgctaatccttgaacaccaataccgataggtctatgtctcttattagagatttcagcttctggaataggataataattaatatctataattttattgagatttctgacaattactttgaccacatccttcagtttgagaaaatcaaatcgcccatctattacaaacatgttcaaggcaacagatgccagattacaaacggctacctcattagcatccgcatattgtattatctcagtgcaaagattactacacttgatagttcctaaattttgttgattactctttttgttacacgcatccttataaagaatgaatggagtaccagtttcaatctgagattctataatcgctttccagacgactcgagcctttattatagatttgtatctcctttctctttcgtatagtgtatacaatcgttcgaactcgtctccccaaacattgtccaatccaggacattcatccggacacatcaacgaccactctccgtcatccttcactcgtttcataaagagatcaggaatccaaagagctataaatagatctctggttctatgttcctcgtttcctgtattctttttaagatcgaggaacgccataatatcagaatgccacggttccaagtatatggccataactccaggccgtttgtttcctccctgatctatgtatctagcggtgttattataaactctcaacattggaataataccgtttgatataccattggtaccggagatatagcttccactggcacgaatattactaattgatagacctattccccctgccattttagagattaatgcgcatcgttttaacgtgtcatagataccctctatgctatcatcgatcatgttaagtagaaaacagctagacatttggtgacgactagttcccgcattaaataaggtaggagaagcgtgcgtaaaccatttttcagaaagtagattgtacgtctcaatagctgagtctatatcccattgatgaattcctactgcgacacgcattaacatgtgctgaggtctttcaacgatcttgttgtttattttcaacaagtaggatttttccaaagttttaaaaccaaaatagttgtatgaaaagtctcgttcgtaaataataaccgagttgagtttatccttatatttgttaactatatccatggtgatacttgaaataatcggagaatgtttcccatttttaggattaacatagttgaataaatcctccatcacttcactaaatagtttttttgtttccttgtgtagatttgatacggctattctggcggctagaatggcataatccggatgttgtgtagtacaagtggctgctatttcggctgccagagtgtccaattctaccgttgttactccattatatattccttgaataaccttcatagctattttaataggatctatatgatccgtgtttaagccataacataattttctaatacgagacgtgattttatcaaacatgacattttccttgtatccatttcgtttaatgacaaacatttttgttggtgtaataaaaaaattatttaacttttcattaatagggatttgacgtatgtagcgtacaaaatgatcgttcctggtatatagataaagagtcctatatatttgaaaatcgttacggctcgattaaactttaatgattgcatagtgaatatatcattaggatttaactccttgactatcatggcggcgccagaaattaccatcaaaagcattaatacagttatgccgatcgcagttaaaacggttatagcatccaccatttatatctaaaaattagatcaaagaatatgtgacaaagtcctagttgtatactgagaattgacgaaacaatgtttcttacatatttttttcttattagtaactgacttaatagtaggaactggaaagctagacttgattattctataagtatagatacccttccagataatgttctctttgataaaagttccagaaaatgtagaattttttaaaaagttatcttttgctattaccaagattgtgtttagacgcttattattaatatgagtgatgaaatccacaccgcctctagatatcgcctttatttccacattagatggtaaatccaatagtgaaactatctttttaggaatgtatggactcgcgtttagaggagtgaacgtcttgggcgtcggaaaggatgattcgtcaaacgaataaacaatttcacaaatggatgttaatgtattagtaggaaattttttgacgctagtggaattgaagattctaatggatgatgttctacctatttcatccgataacatgttaatttccgacaccaacggttttaatatttcgatgatatacggtagtctctctttcggacttatatagcttattccacaatacgagtcattatatactccaaaaaacaaaataactagtataaaatctgtatcgaatgggaaaaacgaaattatcgacataggtatagaatccggaacattgaacgtattaatacttaattctttttctgtggtaagtaccgataggttattgacattgtatggttttaaatattctataacttgagacttgatagatattagtgatgaattgaaaattatttttatcaccacgtgtgtttcaggatcatcgtcgacgcccgtcaaccaaccgaatggagtaaaataaatatcattaatatatgctctagatattagtatttttattaatcctttgattatcatcttctcgtaggcgaatgattccatgatcaagagtgatttgagaacatcctccggagtattaatgggcttagtaaacagtccatcgttgcaataataaaagttatccaagttaaaggatattatgcattcgtttaaagatatcacctcatctgacggagacaattttttggtaggttttagagactttgaagctacttgtttaacaaagttattcatcgtcgtctactattctatttaattttgtagttaatttatcacatatcacattaattgactttttggtccatttttccatacgtttatattcttttaatcctgcgttatccgtttccgttatatccagggatagatcttgcaagttaaatagaatgctcttaaataatgtcattttcttatccgctaaaaatttaaagaatgtataaacctttttcagagatttgaaactcttaggtggtgtcctagtacacaatatcataaacaaactaataaacattccacattcagattccaacagctgattaacttccacattaatacagcctattttcgctccaaatgtacattcgaaaaatctgaataaaacatcgatgtcacaatttgtattatccaatacagaatgtttgtgattcgtgttaaaaccatcggagaaggaatagaaataaaaattattatagtggtggaattcagttggaatattgcctccggagtcataaaaggatactaaacattgttttttatcataaattacacatttccaatgagacaaataacaaaatccaaacattacaaatctagaggtagaacttttaattttgtctttaagtatatacgataagatatgtttattcataaacgcgtcaaatttttcatgaatcgctaaggagtttaagaatctcatgtcaaattgtcctatataatccacttcggatccataagcaaactgagagactaagttcttaatacttcgattgctcatccaggctcctctctcaggctctattttcatcttgacgacctttggattttcaccagtatgtattcctttacgtgataaatcatcgattttcaaatccatttgtgagaagtctatcgccttagatactttttcccgtagtcgaggtttaaaaaaatacgctaacggtatactagtaggtaactcaaagacatcatatatagaatggtaacgcgtctttaactcgtcggttaactctttcttttgatcgagttcgtcgctactattgggtctgctcaggtgccccgactctactagttccaacatcataccgataggaatacaagacactttgccggcggttgtagatttatcatatttttccactacatatccgttacaatttgttaaaaatttagatacatctatattgctacataatccagctagtgaatatatatgacataataaattggtaaatcctagttctggtattttactaattactaaatctgtatatctttccatttatcatggaaaagaatttaccagatatcttcttttttccaaactgcgttaatgtattctcttacaaatattcacaagatgaattcagtaatatgagtaaaacggaacgtgatagtttctcattggccgtgtttccagttataaaacatagatggcataacgcacacgttgtaaaacataaaggaatatacaaagttagtacagaagcacgtggaaaaaaagtatctcctccatcactaggaaaacccgcacacataaacctaaccgcgaagcaatatatatacagtgaacacacaataagctttgaatgttatagttttctaaaatgtataacaaatacagaaatcaattcgttcgatgagtatatattaagaggactattagaagctggtaatagtttacagatattttccaattccgtaggtaaacgaacagatactataggtgtactagggaataagtatccatttagcaaaattccattggcctcattaactcctaaagcacaacgagagatattttcagcgtggatttctcatagacctgtagttttaactggaggaactggagtgggtaagacgtcacaggtacccaagttattgctttggtttaattatttatttggtggattctctactctagataaaatcactgactttcacgaaagaccagtcattctatctcttcctaggatagctttagttagattgcatagcaataccattttaaaatcattgggatttaaggtactagatggatctcctatttctttacggtacggatctataccggaagaattaataaacaaacaaccaaaaaaatatggaattgtattttctacccataagttatctctaacaaaactatttagttatggcactcttattatagacgaagttcatgagcatgatcaaataggagatattattatagcagtagcgagaaagcatcatacgaaaatagattctatgtttttaatgactgccacgttagaggatgacagggaacggctaaaagtatttttacctaatcccgcatttatacatattcctggagatacactgtttaaaattagcgaggtatttattcataataagataaatccatcttccagaatggcatacatagaagaagaaaagagaaatttagttactgctatacagatgtatactcctcctgatggatcatccggtatagtctttgtggcatccgttgcacagtgtcacgaatataaatcatatttagaaaaaagattaccgtatgatatgtatattattcatggtaaggtcttagatatagacgaaatattagaaaaagtgtattcatcacctaatgtatcgataattatttctactccttatttggaatccagcgttactatacgcaatgttacacacatttatgatatgggtagagtttttgtccccgctccttttggaggatcgcaacaatttatttctaaatctatgagagatcaacgaaaaggaagagtaggaagagttaatcctggtacatacgtctatttctatgatctgtcttatatgaagtctatacagcgaatagattcagaatttctacataattatatattgtacgctaataagtttaatctaacactccccgaagatttgtttataatccctacaaatttggatattctatggcgtacaaaggaatatatagactcgttcgatattagtacagaaacatggaataaattattatccaattattatatgaagatgatagagtatgctaaactttatgtactaagtcctattctcgctgaggagttggataactttgagaggacgggagaattaactagtattgtacgagaagccattttatctctaaatttacgaattaagattttaaattttaaacataaagatgatgatacgtatatacacttttgtaaaatattattcggtgtctataacggaacaaacgctactatatattatcatagacctctaacgggatatatgaatatgatttcagatactatatttgttcctgtagataataactaaaaatcaaactctaatgaccacatctttttttagagatgaaaaattttccacatctccttttgtagacacgactaaacattttgcagaaaaaagtttattagtgtttagataatcgtatacttcatcagtgtagatagtaaatgtgaacagataaaaggtattcttgctcaatagattggtaaattccatagaatatattaatcctttcttcttgagatcccacatcatttcaaccagagacgttttatccaatgatttacctcgtactataccacatacaaaactagattttgcagtgacgtcgtacctggtattcttaccaaacaaaattttacttttagttcttttagaaaattctaaggtagaatctctatttgccaatatgtcatctatggaattaccactagcaaaaaatgatagaaatatatattgatacatcgcagctggttttgatctactatactttaaaaacgaatcagattccataattgcctgtatatcatcagctgaaaaactatgttttacacgtattccttcggcatttctttttaatgatatatcttgtttagacaatgataaagttatcatgtccatgagagacgcgtctccgtatcgtataaatatttcattagatgttagacgcttcattaggggtatacttctataaggtttcttaatcagtccatcattggttgcgtcaagaactactatcggatgttgttgggtatctctagtgttacacatggccttactaaagtttgggtaaataactatgatatctctattaattatagatgcatatatttcatttgtcaaggatattagtatcgacttgctatcgtcattaatacgtgtaatgtaatcatataaatcatgcgatagccaaggaaaatttaaatagatgttcatcatataatcgtcgctataattcatattaatacgttgacattgactaatttgtaatatagcctcgccacgaagaaagctctcgtattcagtttcatcgataaaggataccgttaaatataactggttgccgatagtctcatagtctattaagtggtaagtttcgtacaaatacagaatccctaaaatattatctaatgttggattaatctttaccataactgtataaaatggagacggagtcataactattttaccgtttgtacttactggaatagatgaaggaataatctccggacatgctggtaaagacccaaatgtctgtttgaagaaatccaatgttccaggtcctaatctcttaacaaaaattacgatattcgatcccgatatcctttgcattctatttaccagcatatcacgaactatattaagattatctatcatgtctattctcccaccgttatataaatcgcctccgctaagaaacgttagtatatccatacaatggaatacttcatttctaaaatagtattcgttttctaattctttaatgtgaaatcgtatactagaaagggaaaaattatctttgagttttccgttagaaaagaaccacgaaactaatgttctgattgcgtccgattccgttgctgaattaatggatttacaccaaaaactcatataacttctagatgtagaagcattcgctaaaaaattagtagaatcaaaggatataagtagatgttccaacaagtgagcaattcccaagatttcatctatatcattctcgaatccgaaattagaaattcccaagtagatatcctttttcatccgatcgttgatgaaaatacgaactttattcggtaagacaatcatttactaaggagtaaaataggaagtaatgttcgtatgtcgttatcatcgtataaattaaaggtgtgttttttaccattaagtgacattataattttaccaatattggaattataatataggtgtatttgcgcactcgcgacggttgatgcatcggtaaatatagctgtatctaatgttctagtcggtatttcatcatttcgctgtctaataatagcgttttctctatctgtttccattacagctgcctgaagtttattggtcggataatatgtaaaataataagaaatacatacgaataacaaaaataaaataagatataataaagatgccatttagagatctaattttgtttaacttgtccaaattcctacttacagaagatgaggaatcgttggagatagtgtcttccttatgtagaggatttgaaatatcttataatgacttgataacttactttccagataggaaataccataaatatatttataaagtatttgaacatgtagatttatcggaggaattaagtatggaattccatgatacaactctgagagatttagtctatcttagattgtacaagtattccaagtgtatacggccgtgttataaattaggagataatctaaaaggcatagttgttataaaggacaggaatatttatattagggaagcaaatgatgacttgatagaatatctcctcaaggaatacactcctcagatttatacatattctaatgagcgcgtccccataactggttcaaaattaattctttgtggattttctcaagttacatttatggcgtatacaacgtcgcatataacaacaaataaaaaggtagatgttctcgtttccaaaaaatgtatagatgaactagtcgatccaataaattatcaaatacttcaaaatttatttgataaaggaagcggaacaataaacaaaatactcaggaagatattttattcggtaacaggtggccaaactccataggtagctttttctatttcggattttagaatttccaaattcaccagcgatttatcggttttggtgaaatccaaggatttattaatgtccacaaatgccatttgttttgtctgtggattgtatttgaaaatggaaacgatgtagttagatagatgcgctgcgaagtttcctattagggttccgcgcttcacgtcacccagcatacttgaatcaccatcctttaaaaaaaatgataagatatcaacatggagtatatcatactcggattttaattcttctactgcatcactgacattttcacaaatactacaatacggtttaccgaaaataatcagtacgttcttcatttatgggtatcaaaaacttaaaatcgttactgctggaaaataaatcactgacgatattagatgataatttatacaaagtatacaatggaatatttgtggatacaatgagtatttatatagccgtcgccaattgtgtcagaaacttagaagagttaactacggtattcataaaatacgtaaacggatgggtaaaaaagggagggcatgtaaccctttttatcgatagaggaagtataaaaattaaacaagacgttagagacaagagacgtaaatattctaaattaaccaaggacagaaaaatgttagaattagaaaagtgtacatccgaaatacaaaatgttaccggatttatggaagaagaaataaaggcagaaatgcaattaaaaatcgataaactcacatttcaaatatatttatctgattctgataacataaaaatatcattgaatgagatactaacacatttcaacaataatgagaatgttacattattttattgtgatgaacgagacgcagaattcgttatgtgtctcgaggctaaaacacatttctctaccacaggagaatggccgttgataataagtaccgatcaggatactatgctatttgcatctgctgataatcatcctaagatgataaaaaacttaactcaactgtttaaatttgttccctcggcagaggataactatttagcaaaattaacggcgttagtgaatggatgtgatttctttcctggactctatggggcatctataacacccaccaacttaaacaaaatacaattgtttagtgattttacaatcgataatatagtcactagtttggcaattaaaaattattatagaaagactaactctaccgtagacgtgcgtaatattgttacgtttataaacgattacgctaatttagacgatgtctactcgtatattcctccttgtcaatgcactgttcaagaatttatattttccgcattagatgaaaaatggaatgaatttaaatcatcttatttagaaagcgtgccgttaccctgccaattaatgtacgcgttagaaccacgcaaggagattgatgtttcagaagttaaaactttatcatcttatatagatttcgaaaatactaaatcagatatcgatgttataaaatctatatcctcgatcttcggatattctaacgaaaactgtaacacgatagtattcggcatctataaggataatttactactgagtataaataattcattttactttaacgatagtctgttaataaccaatactaaaagtgataatataataaatataggttactagattaaaaatggtgttccaactcgtgtgctctacatgcggtaaagatatttctcacgaacgatataaattgattatacgaaaaaaatcattaaaggatgtactcgtcagtgtaaagaacgaatgttgtaggttaaaattatctacacaaatagaacctcaacgtaacttaacagtgcaacctctattggatataaactaatatggatccggttaattttatcaagacatatgcgcctagaggttctattatttttattaattataccatgtcattaacaagtcatttgaatccatcgatagaaaaacatgtgggtatttattatggtacgttattatcggaacacttggtagttgaatcaacatatagaaaaggagttcgaatagtcccattggatagtttttttgaaggatatcttagtgcaaaagtatacatgttagagaatattcaagttatgaaaatagcagctgatacgtcattaactttattgggtattccgtatggatttggtcataatagaatgtattgttttaaattggtagctgactgttataaaaatgccggtattgatacatcgtctaaacgaatattgggcaaagatatttttctgagccaaaacttcacagacgataatagatggataaagatatatgattctaataatttaacattttggcaaattgattaccttaaagggtgagttaatatgcataactactcctccgttgttttttccctcgttctttttcttaacgttgtttgccatcactctcataatgtaaagatattctaaaatggtaaacttttgcatatcggacgcagaaattggtataaatgttgtaattgtattatttcccgtcaatggactagtcacagctccatcagttttatatcctttagagtatttctcactcgtgtctaacattctagagcattccatgatctgtttatcgttgatattggccggaaagatagattttttattttttattatattactattggcaattgtagatataacttctggtaaatatttttctaccttttcaatctcttctattttcaagccggctatatattctgctatattgttgctagtatcaataccttttctggctaagaagtcatatgtggtattcactatatcagttttaactggtagttccattagcctttccacttctgcagaataatcagaaattggttctttaccagaaaatccagctactataataggctcaccgatgatcattggcaaaatcctatattgtaccagattaatgagagcatatttcatttccaataattctgctagttcttgagacattgatttatttgatgaatctagttggttctctagatactctaccatttctgccgcatacaataacttgttagataaaatcagggttatcaaagtgtttagcgtggctagaatagtgggcttgcatgtattaaagaatgcggtagtatgagtaaaccgttttaacgaattatatagtctccagaaatctgtggcgttacatacatgagccgaatgacatcgaagattgtccaatatttttaatagctgctctttgtccattatttctatatttgactcgcaacaattgtagataccattaatcaccgattcctttttcgatgccggacaatagcacaattgtttagctttggactctatgtattcagaattaatagatatatctctcaatacagattgcactatacattttgaaactatgtcaaaaattgtagaacgacgctgttctgcagccatttaactttaaataatttacaaaaatttaaaatgagcatccgtataaaaatcgataaactgcgccaaattgtggcatatttttcagagttcagtgaagaagtgtctataaatgtagactcgacggatgagttaatgtatatttttgccgccttgggcggatctgtaaacatttgggcaattatacctctaagtgcatcagtgttttaccgaggagccgaaaatattgtgtttaatcttcctgtgtccaaggtaaaatcgtgtttgtgtagttttcacaatgatgccatcatagatatagaacctgatctggaaaataatctagtaaaactttctagttatcatgtagtaagtgtcgattgtaacaaggaactgatgcctattaggacagatactactatttgtctaagtatagatcaaaagaaatcttacgtgtttaattttcacaagtatgaagaaaaatgttgtggtagaaccgtcattcatctagaatggttgttgggctttatcaagtgtattagtcagcatcagcatctggctattatgtttaaagatgacaatattattatgaagactcctggtaatactgatgcgttttccagggaatattctatgactgaatgttctcaagaactacaaaagttttctttcaaaatagctatctcgtctctcaacaaactacgaggattcaaaaagagagtcaatgtttttgaaactagaatcgtaatggataatgacgataacattttaggaatgttgttttcggatagagttcaatcctttaagatcaacatctttatggcgtttttagattaatactttcaatgagataaatatgggtggcggagtaagtgttgagctccctaaacgggatccgcctccgggagtacccactgatgagatgttattaaacgtggataaaatgcatgacgtgatagctcccgctaagcttttagaatatgtgcatataggaccactagcaaaagataaagaggataaagtaaagaaaagatatccagagtttagattagtcaacacaggacccggtggtctttcggcattgttaagacaatcgtataatggaaccgcacccaattgctgtcgcacttttaatcgtactcattattggaagaaggatggaaagatatcagataagtatgaagagggtgcagtattagaatcgtgttggccagacgttcacgacactggaaaatgcgatgttgatttattcgactggtgtcagggggatacgttcgatagaaacatatgccatcagtggatcggttcagcctttaataggagtaatagaactgtagagggtcaacaatcgttaataaatctgtataataagatgcaaacattatgtagtaaagatgctagtgtaccaatatgcgaatcatttttgcattatttacgcgcacacaatacagaagatagcaaagagatgatcgattatattctaagacaacagtctgcggactttaaacagaaatatatgagatgtagttatcccactagagataagttagaagagtcattaaaatatgcggaacctcgagaatgttgggatccagagtgttcgaatgccaatgttaatttcttactaacacgtaattataataatttaggactttgcaatattgtacgatgtaataccagcgtgaacaacttacagatggataaaacttcctcattaagattgtcatgtggattaagcaatagtgatagattttctactgttcccgtcaatagagcaaaagtagttcaacataatattaaacactcgttcgacctaaaattgcatttgatcagtttattatctctcttggtaatatggatactaattgtagctatttaaatgggtgccgcggcaagcatacagacgacggtgaatacactcagcgaacgtatctcgtctaaattagaacaagaagcgaatgctagtgctcaaacaaaatgtgatatagaaatcggaaatttttatatccgacaaaaccatggatgtaacctcactgttaaaaatatgtgctctgcggacgcggatgctcagttggatgctgtgttatcagccgctacagaaacatatagtggattaacaccggaacaaaaagcatacgtgccagctatgtttactgctgcgttaaacattcagacgagtgtaaacactgttgttagagattttgaaaattatgtgaaacagacttgtaattctagcgcggtcgtcgataacaaattaaagatacaaaacgtaatcatagatgaatgttacggagccccaggatctccaacaaatttggaatttattaatacaggatctagcaaaggaaattgtgccattaaagcgttgatgcaattgacgactaaggccactactcaaatagcacctagacaagttgctggtacaggagttcagttttatatgattgttatcggtgttataatattggcagcgttgtttatgtactatgccaagcgtatgctgttcacatccaccaatgataaaatcaaacttattttagccaataaggaaaacgtccattggactacttacatggacacattctttagaacttctccgatggttattgctaccacggatatgcaaaactgaaaatatattgataatattttaatagattaacatggaagttatcgctgatcgtctagacgatatagtgaaacaaaatatagcggatgaaaaatttgtagattttgttatacacggtctagagcatcaatgtcctgctatacttcgaccattaattaggttgtttattgatatactattatttgttatagtaatttatatttttacggtacgtctagtaagtagaaattatcaaatgttgttggtggtgctagtcatcacattaactattttttattactttatactataatagtactagactgacttctaacaaacatctcacctgccataaataaatgcttgatattaaagtcttctatttctaacactattccatctgtggaaaataatactctgacattatcgctaattgacacatcggtgagtgatatgcctataaagtaataatcttctttgggcacatataccagtgtaccaggttctaacaacctatttactggtgctcctgtagcatactttttctttaccttgagaatatccatcgtttgcttggtcaatagcgatatgtgattttttatcaaccactcgaaaaagtaattggagtgttcatatcctctacgggctattgtctcatggccgtgtatgaaatttaagtaacacgactgtggtagatttgttctatagagccggttgccgcaaatagatagaactaccaatatgtctgtacaaatgttaaacattaattgattaacagaaaaaacaatgttcgttctgggaatagaaaccagatcaaaacaaaattcgttagaatatatgccacgtttatacatggaatataaaataactacagtttgaaaaataacagtatcatttaaacatttaacttgcggggttaatctcacaactttactgtttttgaactgttcaaaatatagcatcgatccgtgagaaatacgtttagccgcctttaatagaggaaatcccaccgcctttctggatctcaccaacgacgatagttctgaccagcaactcatttcttcatcatccacctgttttaacatataataggcaggagatagatatccgtcattgcaatattccttctcgtaggcacacaatctaatattgataaaatctccattctcttctctgcatttattatcttgtctcggtggctgattaggctgtggtcttggtttaggccttggtctatcgttgttgaatctattttggtcattaaatctttcatttcttcctggtatatttctatcacctcgtttggttggatttttgtctatattatcgtttgtaacatcggtacgggtattcatttatcacaaaaaaaacttctctaaatgagtctactgctagaaaacctcatcgaagaagataccatattttttgcaggaagtatatctgagtatgatgatttacaaatggttattgccggcgcaaaatccaaatttccaagatctatgctttctatttttaatatagtacctagaacgatgtcaaaatatgagttggagttgattcataacgaaaatatcacaggagcaatgtttaccacaatgtataatataagaaacaatttgggtctaggagatgataaactaactattgaagccattgaaaactatttcttggatcctaacaatgaagttatgcctcttattattaataatacggatatgactgccgtcattcctaaaaaaagtggtaggagaaagaataagaacatggttatcttccgtcaaggatcatcacctatcttgtgcattttcgaaactcgtaaaaagattaatatttataaagaaaatatggaatccgcgtcgactgagtatacacctatcggagacaacaaggctttgatatctaaatatgcgggaattaatgtcctgaatgtgtattctccttccacatccataagattgaatgccatttacggattcaccaataaaaataaactagagaaacttagtactaataaggaactagaatcgtatagttctagccctcttcaagaacccattaggttaaatgattttctgggactattggaatgtgttaaaaagaatattcctctaacagatattccgacaaaggattgattactataaatggagaatgttcctaatgtatactttaatcctgtgtttatagagcccacgtttaaacattctttattaagtgtttataaacacagattaatagttttatttgaagtattcattgtattcattctaatatatgtattttttagatctgaattaaatatgttcttcatgcctaaacgaaaaatacccgatcctattgatagattacgacgtgctaatctagcgtgtgaagacgataaattaatgatctatggattaccatggatgacaactcaaacatctgcgttatcaataaatagtaaaccgatagtgtataaagattgtgcaaagcttttgcgatcaataaatggatcacaaccagtatctcttaacgatgttcttcgcagatgatgattcattttttaagtatttggctagtcaagatgatgaatcttcattatctgatatattgcaaatcactcaatatctagactttctgttattattattgatccaatcaaaaaataaattagaagctgtgggtcattgttatgaatctctttcagaggaatacagacaattgacaaaattcacagactttcaagattttaaaaaactgtttaacaaggtccctattgttacagatggaagggtcaaacttaataaaggatatttgttcgactttgtgattagtttgatgcgattcaaaaaagaatcctctctagctaccaccgcaatagatcctgttagatacatagatcctcgtcgtgatatcgcattttctaacgtgatggatatattaaagtcgaataaagtgaacaataattaattctttattgtcatcatgaacggcggacatattcagttgataatcggccccatgttttcaggtaaaagtacagaattaattagacgagttagacgttatcaaatagctcaatataaatgcgtgactataaaatattctaacgataatagatacggaacgggactatggacgcatgataagaataattttgaagcattggaagcaactaaactatgtgatgtcttggaatcaattacagatttctccgtgataggtatcgatgaaggacagttctttccagacattgtttaattctgtgagcgtatggcaaacgaaggaaaaatagttatagtagccgcactcgatgggacatttcaacgtaaaccgtttaataatattttgaatcttattccattatctgaaatggtggtaaaactaactgctgtgtgtatgaaatgctttaaggaggcttccttttctaaacgattgggtgaggaaaccgagatagagataataggaggtaatgatatgtatcaatcggtgtgtagaaagtgttacgtcggctcataatattatattttttatctaaaaaactaaaaataaacattgattaaattttaatataatacttaaaaatggatgttgtgtcgttagataaaccgtttatgtattttgaggaaattgataatgagttagattacgaaccagaaagtgcaaatgaggtcgcaaaaaaactgccgtatcaaggacagttaaaactattactaggagaattattttttcttagtaagttacagcgacacggtatattagatggtgccaccgtagtgtatataggatcggctcctggtacacatatacgttatttgagagatcatttctataatttaggagtgatcatcaaatggatgctaattgacggccgccatcatgatcctattctaaatggattgcgtgatgtgactctagtgactcggttcgttgatgaggaatatctacgatccatcaaaaaacaactgcatccttctaagattattttaatttctgatgtgagatccaaacgaggaggaaatgaacctagtacggcggatttactaagtaattacgctctacaaaatgtcatgattagtattttaaaccccgtggcgtctagtcttaaatggagatgcccgtttccagatcaatggatcaaggacttttatatcccacacggtaataaaatgttacaaccttttgctccttcatattcagctgaaatgagattattaagtatttataccggtgagaacatgagactgactcgagttaccaaattagacgctgtaaattatgaaaaaaagatgtactaccttaataagatcgtccgtaacaaagtagttgttaactttgattatcctaatcaggaatatgactattttcacatgtactttatgctgaggaccgtgtactgcaataaaacatttcctactactaaagcaaaggtactatttctacaacaatctatatttcgtttcttaaatattccaacaacatcaactgaaaaagttagtcatgaaccaatacaacgtaaaatatctagcaaaaattctatgtctaaaaacagaaatagcaagagatccgtacgcggtaataaatagaaacgtactactgagatatactaccgatatagagtataatgatttagttactttaataaccgttagacataaaattgattctatgaaaactgtgtttcaggtatttaacgaatcatccataaattatactccggttgatgatgattatggagaaccaatcattataacatcgtatcttcaaaaaggtcataacaagtttcctgtaaattttctatacatagatgtggtaatatctgacttatttcctagctttgttagactagatactacagaaactaatatagttaatagtgtactacaaacaggcgatggtaaaaagactcttcgtcttcccaaaatgttagagacggaaatagttgtcaagattctctatcgccctaatataccattaaaaattgttagatttttccgcaataacatggtaactggagtagagatagccgatagatctgttatttcagtcgctgattaatcaattagtagagatgagataagaacattataataatcaataatatatcttatatcttatatcttatatcttatatcttgtttagaaaaatgctaatattaaaatagctaacgctagtaatccaatcggaagccatttgatatctataatagggtatctaatttcctgatttaaatagcggacagctatattctcggtagctactcgtttggaatcacaaacattatttacatctaatttactatctgtaatggaaacgtttcccaatgaaatggtacaatccgatacattgcattttgttatatttttttttaaagaggctggtaacaacgcatcgcttcgtttacatggctcgtaccaacaataatagggtaatcttgtatctattcctatccgtactatgcttttatcaggataaatacatttacatcgtatatcgtctttgttagcatcacagaatgcataaatttgttcgtccgtcatgataaaaatttaaagtgtaaatataactattatttttatagttgtaataaaaagggaaatttgattgtatactttcggttctttaaaagaaactgacttgataaaaatggctgtaatctctaaggttacgtatagtctatatgatcaaaaagagattaatgctacagatattatcattagtcatgttaaaaatgacgacgatatcggtaccgttaaagatggtagactaggtgctatggatggggcattatgtaaaacttgtgggaaaacggaattggaatgtttcggtcactggggtaaagtaagtatttataaaactcatatagttaagcctgaatttatttcagaaattattcgtttactgaatcatatatgtattcactgcggattattgcgttcacgagaaccgtattccgacgatattaacctaaaagagttatcgggacacgctcttaggagattaaaggataaaatattatccaagaaaaagtcatgttggaacagtgaatgtatgcaaccgtatcaaaaaattactttttcaaagaaaaaggtttgtttcgtcaacaagttggatgatattaacgttcctaattctctcatctatcaaaagttaatttctattcatgaaaagttttggccattattagaaattcatcaatatccagctaacttattttatacagactactttcccatccctccgttgattattagaccggctattagtttttggatagatagtatacccaaagagaccaatgaattaacttacttattaggtatgatcgttaagaattgtaacttgaatgctgatgaacaggttatccagaaggcggtaatagaatacgatgatattaaaattatttctaataacactaccagtatcaatttatcatatattacatccggcaaaaataatatgattagaagttatatcgtcgcccgacgaaaagatcagaccgctagatctgtaattggtcccagtacatctatcaccgttaatgaggtaggaatgcccgcatatattagaaatacacttacagaaaagatatttgttaatgcctttacagtggataaagttaaacaactattagcgtcaaaccaagttaaattttactttaataaacgattaaaccaattaacaagaatacgccaaggaaagtttattaaaaataaaatacatttattgcctggtgattgggtagaagtagctgttcaagaatatacaagtattatttttggaagacagccgtctctacatagatacaacgtcatcgcttcatctatcagagctaccgaaggagatactatcaaaatatctcccggaattgccaactctcaaaatgctgatttcgacggggatgaggaatggatgatattagaacaaaatcctaaagctgtaattgaacaaagtattcttatgtatccgacgacgttactcaaacacgatattcatggagcccccgtttatggatctattcaagatgaaatcgtagcagcgtattcattgtttaggatacaagatctttgtttagatgaagtattgaacatcttggggaaatatggaagagagttcgatcctaaaggtaaatgtaaattcagcggtaaagatatctatacttacttgataggtgaaaagattaattatccgggtctcttaaaggatggtgaaattattgcaaacgacgtagatagtaattttgttgtggctatgaggcatctgtcattggctggactcttatccgatcataagtcgaacgtggaaggtatcaactttattatcaagtcatcttatgtttttaagagatatctatctatttacggttttggggtgacattcaaagatctgagaccaaattcgacgttcactaataaattggaggccatcaacgtagaaaaaatagaacttatcaaagaagcatacgccaaatatctcaacgatgtaagagacgggaaaatagttccattatctaaagctttagaggcggactatgtggaatccatgttatccaacttgacaaatcttaatatccgagagatagaagaacatatgagacaaacgctgatagatgatccagataataacctcctgaaaatggccaaagcgggttataaagtaaatcccacagaactaatgtatattctaggtacgtatggacaacaaaggattgatggtgaaccagcagagactcgagtattgggtagagttttaccttactatcttccagactctaaggatccagaaggaagaggttatattcttaattctttaacaaaaggattaacgggttctcaatattacttttcgatgctggttgcaagatctcaatctactgatatcgtctgtgaaacatcacgtaccggaacactggctagaaaaatcattaaaaagatggaggatatggtggtcgacggatacggacaagtagttataggtaatacgctcatcaagtacgccgccaattataccaaaattctaggctcagtatgtaaacctgtagatcttatctatccagatgagtccatgacttggtatttggaaattagtgctctgtggaataaaataaaacagggattcgtttactctcagaaacagaaacttgcaaagaagacattggcgccgtttaatttcctagtattcgtcaaacccaccactgaggataatgctattaaggttaaggatctgtacgatatgattcataacgtcattgatgatgtgagagagaaatacttctttacggtatctaatatagattttatggagtatatattcttgacgcatcttaatccttctagaattagaattacaaaagaaacggctatcactatctttgaaaagttctatgaaaaactcaattatactctaggtggtggaactcctattggaattatttctgcacaggtattgtctgagaagtttacacaacaagccctgtccagttttcacactactgaaaaaagtggtgccgtcaaacaaaaacttggtttcaacgagtttaataacttgactaatttgagtaagaataagaccgaaattatcactctggtatccgatgatatctctaaacttcaatctgttaagattaatttcgaatttgtatgtttgggagaattaaatccagacatcactcttcgaaaagaaacagataggtatgtagtagatataatagtcaatagattatacatcaagagagcagaaataaccgaattagtcgtcgaatatatgattgaacgatttatctcctttagcgtcattgtaaaggaatggggtatggaaacattcattgaggatgaggataatattagatttactgtctacctaaatttcgttgaaccggaagaattgaatcttagtaagtttatgatggttcttccgggtgccgccaacaagggaaagattagtaaattcaagattcctatctctgactatacgggttatgacgacttcaatcaaacaaaaaagctcaataagatgactgtagaactcatgaatctaaaagaattgggttctttcgatttggaaaacgtcaacgtgtatcctggagtatggaatacatacgatatcttcggtatcgaggccgctcgtgaatacttgtgcgaagccatgttaaacacctatggagaagggttcgattatctgtatcagccttgtgatcttctcgctagtttactatgtgctagttacgaaccagaatcagtgaataaattcaagttcggcgcagctagtactcttaagagagctacgttcggagacaataaagcattgttaaacgcggctcttcataaaaagtcagaacctattaacgataatagtagctgccacttttttagcaaggtccctaatataggaactggatattacaaatactttatcgacttgggtcttctcatgagaatggaaaggaaactatctgataagatatcttctcaaaagatcaaggaaatggaagaaacagaagacttttaattcttatcaataacatatttttctatgatctgtcttttaaacgatggattttccacaaatgcgcctctcaagtccctcatagaatgatacacgtataaaaaatatagcataggcgatgactccttatttttagacattagatatgccaaaatcatagccccgcttctatttactcccgcagcacaatgaaccaacacgggctcgtttcgttgatcacatttagataaaaaggcggttacgtcgtcaaaatatttactaatatcggtagttgtatcatctaccaacggtatatgaataatattaatattagagttaggtaatgtatatttatccatcgtcaaatttaaaacatatttgaacttaacttcagatgatggtgcatccatagcatttttataatttcccaaatacacattattggttacccttgtcattatagtgggagatttggctctgtgcatatctccagttgaacgtagtagtaagtatttatacaaacttttcttatccatttataacgtacaaatggataaaactactttatcggtaaacgcgtgtaatttagaatacgttagagaaaaggctatagtaggcgtacaagcagccaaaacatcaacacttatattctttgttattatattggcaattagtgcgctattactctggtttcagacgtctgataatccagtctttaatgaattaacgagatatatgcgaattaaaaatacggttaacgattggaaatcattaacggatagcaaaacaaaattagaaagtgatagaggtaaacttctagccgctggtaaggatgatatattcgaattcaaatgtgtggatttcggcgcctattttatagctatgcgattggataagaaaacatatctgccgcaagctattaggcgaggtactggagacgcgtggatggttaaaaaggcggcaaaggtcgatccatctgctcaacaattttgtcagtatttgataaaacacaagtctaataatgttattacttgtggtaatgagatgttaaatgaattaggttatagcggttattttatgtcaccgcattggtgttccgattttagtaatatggaatagtgttagataaatgcggtaacgaatgttcctgtaaggaaccataacagtttagatttaacgttaaagatgagcataaacataataaacaaaattacaatcaaacttataacattaatatcaaacaatccaaaaaatgaaatcagtggagtagtaaacgcgtacataactcctggataacgtttagcagctgccgttcctattctagaccaaaaatttggtttcatgttttcgaaacggtattctgcaacaagtcggggatcgtgttctacatatttggcggcattatccagtatctgcctattgatcttcatttcgttttcgattctggctatttcaaaataaaatcccgatgatagacctccagactttataatttcatctacgatgttcagcgccgtagtaactctaataatataggctgataagctaacatcataccctcctgtatatgtgaatatggcatgatttttgtccattacaagctcggttttaactttattgcctgtaataatttctctcatctgtaggatatctatttttttgtcatgcattgccttcaagacgggacgaagaaacgtaatatcctcaataacgttatcgttttctacaataactacatattctacctttttattttctaactcggtaaaaaaattagaatcccatagggctaaatgtctagcgatatttcttttcgtttcttctgtacacatagtgttacaaaaccctgaaaagaagtgagtatacttgtcatcatttctaatgtttcctccagtccactgtataaacgcataatccttgtaatgatctggatcatccttgactaccacaacatttcttttttctggcataacttcgttgtcctttacatcatcgaacttctgatcattaatatgctcatgaacattaggaaatgtttctgatggaggtctatcaataactggcacaacaataacaggagttttcaccgccgccatttagttattgaaattaatcatatacaactctttaatacgagttatattttcgtctatccattgtttcacattgacatatttcgacaaaaagatataaaatgcgtattccaatgcttctctgtttaatgaattactaaaatatacaaacacgtcactgtctggcaataaatgatatcttagaatattgtaacaatttattttgtattgcacatgttcgtgatctatgagttcttcttcgaatggcataggatctccgaatctgaaaacgtataaataggagttagaataataatatttgagagtattggtaatatataaactctttagcggtataattagtttttttctctcaatttctatttttagatgtgatggaaaaatgactaattttgtagcattagtatcatgaactctaatcaaaatcttaatatcttcgtcacacgttagctctttgaagtttttaagagatgcatcagttggttctacagatggagtaggtgcaacaattttttgttctacacatgtatgtactggagccattgttttaactataatggtgcttgtatcgaaaaactttaatgcagatagcggaagctcttcgccgcgactttctacgtcgtaattgggttctaacgccgatctctgaatggatactagttttctaagttctaatgtgattctctgaaaatgtaaatccaattcctccggcattatagatgtgtatacatcggtaaataaaactatagtatccaacgatcccttctcgcaaattctagtcttaaccaaaaaatcgtatataaccacggagatggcgtatttaagagtggattcttctaccgttttgttcttggatgtcatataggaaactataaagtccgcactactgttaagaatgattactaacgcaactatatagtttaaattaagcattttggaaacataaaataactctgtagacgatacttgactttcgaataagtttgcagacaaacgaagaaagaacagacctctcttaatttcagaagaaaactttttttcgtattcctgacgtctagagtttatatcaataagaaagttaagaattagtcggttaatgttgtatttcattacccaagtttgagatttcataatattatcaaaagacatgataatattaaagataaagcgctgactatgaacgaaatagctatatggttcgctcaagaatatagtcttgttaaacgtggaaacgataactgtatttttaatcacgtcagcggcatctaaattaaatataggtatatttattccacacactctacaatatgccacaccatcttcataataaataaattcgttagcaaaattattaattttagtgaaatagttagcgtcaactttcatagcttccttcaatctaatttgatgctcacacggtgcgaattccactctaacatcccttttccatgcctcaggttcatcgatctctataatatctagttttttgcgtttcacaaacacaggctcgtctctcgcgatgagatctgtatagtaactatgtaaatgataactagatagaaagatgtagctatatagatgacgatcctttaagagaggtataataactttaccccaatcagatagactgttgttatggtcttcggaaaaagaatttttataaatttttccagtattttccaaatatacgtacttaacatctaaaaaatccttaatgataataggaatggataatccgtctattttataaagaaatacatatcgcacattatacttttttttggaaatgggaataccgatgtgtctacataaatatgcaaagtctaaatattttttagagaatcttagttggtccaaattcttttccaagtacggtaatagatttttcatattgaacggtatcttcttaatctctggttctagttccgcattaaatgatgaaactaagtcactatttttataactaacgattacatcacctctaacatcatcatttaccagaatactgatcttcttttgtcgtaaatacatgtctaatgtgttaaaaaaaagatcatacaagttatacgtcatttcatctgtggtattcttgtcattgaaggataaactcgtactaatctcttctttaacagcctgttcaaatttatatcctatatacgaaaaaatagcaaccagtgtttgatcatccgcgtcaatattctgttctatcgtagtgtataacaatcgtatatcttcttctgtgatagtcgatacgttataaaggttgataacgaaaatatttttatttcgtgaaataaagtcatcgtaggattttggacttatatttgcgtctagtagatatgcttttatttttggaatgatctcaattagaatagtctctttagagtccatttaaagttacaaacaactaggaaattggtttatgatgtataatttttttagtttttatagattctttattctatacttaaaaaatgaaaataaatacaaaggttcttgagggttgtgttaaattgaaagcgagaaataatcataaattatttcattatcgcgatatccgttaagtttgtatcgtaatggcgtggtcaattacaaataaagcggatactagtagcttcacaaagatggctgaaatcagagctcatctaaaaaatagcgctgaaaataaagataaaaacgaggatattttcccggaagatgtaataattccatctactaagcccaaaaccaaacgagccactactcctcgtaaaccagcggctactaaaagatcaaccaaaaaggaggaagtggaagaagaagtagttatagaggaatatcatcaaacaactgaaaaaaattctccatctcctggagtcagcgacattgtagaaagcgtggccgctgtagagctcgatgatagcgacggggatgatgaacctatggtacaagttgaagctggtaaagtaaatcatagtgctagaagcgatctctctgacctaaaggtggctaccgacaatatcgttaaagatcttaagaaaattattactagaatctctgcagtatcgacggttctagaggatgttcaagcagctggtatctctagacaatttacttctatgactaaagctattacaacactatctgatctagtcaccgagggaaaatctaaagttgttcgtaaaaaagttaaaacttgtaagaagtaaatgcgtgcacttttttataaagatggtaaactctttaccgataataattttttaaatcctgtatcagacgataatccagcgtatgaggttttgcaacatgttaaaattcctactcatttaacagatgtagtagtatatgaacaaacgtgggaggaggcgttaactagattaatttttgtgggaagcgattcaaaaggacgtagacaatacttttacggaaaaatgcatgtacagaatcgcaacgctaaaagagatcgtatttttgttagagtatataacgttatgaaacgaattaattgttttataaacaaaaatataaagaaatcgtccacagattccaattatcagttggcggtttttatgttaatggaaactatgttttttattagatttggtaaaatgaaatatcttaaggagaatgaaacagtagggttattaacactaaaaaataaacacatagaaataagtcccgatgaaatagttatcaagtttgtaggaaaggacaaagtttcacatgaatttgttgttcataagtctaatagactatataaaccgctattgaaactgacggatgattctagtcccgaagaatttctgttcaacaaactaagtgaacgaaaggtatacgaatgtatcaaacagtttggtattagaatcaaggatctccgaacgtatggagtcaattatacgtttttatataatttttggacaaatgtaaagtccatatctcctcttccgtcaccaaaaaagttaatagcgttaactatcaaacaaactgctgaagtggtaggtcatactccatcaatttcaaaaagagcttatatggcaacgactattttagaaatggtaaaggataaaaattttttagatgtagtatctaaaactacgttcgatgaattcctatctatagtcgtagatcacgttaaatcatctacggatggatgatatagatctttacacaaataattacaagaccgataaatggaaatggataagcgtatgaaatctctcgcaatgacagctttcttcggagagctaagcacattagatattatggcattgataatgtctatatttaaacgccatccaaacaataccattttttcagtggataaggatggtcagtttatgattgatttcgaatacgataattataaggcttctcaatatttggatctgaccctcactccgatatctggagatgaatgcaagactcacgcatcgagtatagccgaacaattggcgtgtgtggatattattaaagaggatattagcgaatatatcaaaactactccccgtcttaaacgatttataaaaaaataccgcaatagatcagatactcgcatcagtcgagatacagaaaagcttaaaatagctctagctaaaggcatagattacgaatatataaaagacgcttgttaataagtaaatgaaaaaaaactagtcgtttataataaaacacgatatggatgccaacgtagtatcatcttctactattgcgacgtatatagacgctttagcgaagaatgcttcagaattagaacagaggtctaccgcatacgaaataaataatgaattggaactagtatttattaagccgccattgattactttgacaaatgtagtgaatatctctacgattcaggaatcgtttattcgatttaccgttactaataaggaaggtgttaaaattagaactaagattccattatctaaggtacatggtctagatgtaaaaaatgtacagttagtagatgctatagataacatagtttgggaaaagaaatcattagtgacggaaaatcgtcttcacaaagaatgcttgttgagactatcgacagaggaacgtcatatatttttggattacaagaaatatggatcctctatccgactagaattagtcaatcttattcaagcaaaaacaaaaaactttacgatagactttaagctaaaatattttctaggatccggtgcccaatctaaaagttctttgttgcacgctattaatcatccaaagtcaaggcctaatacatctctggaaatagaattcacacctagagacaatgaaacagttccatatgatgaactaataaaggaattgacgactctctcgcgtcatatatttatggcttctccagagaatgtaattctttctccgcctattaacgcgcctataaaaacctttatgttgcctaaacaagatatagtaggtttggatctggaaaatctatatgccgtaactaagactgacggcattcctataactatcagagttacatcaaacgggttgtattgttattttacacatcttggttatattattagatatcctgttaagagaataatagattccgaagtagtagtctttggtgaggcagttaaggataagaactggaccgtatatctcattaagctaatagagcccgtgaatgctatcagtgatagactagaagaaagtaagtatgttgaatctaaactagtggatatttgtgatcggatagtattcaagtcaaagaaatacgaaggtccgtttactacaactagtgaagtcgtcgatatgttatctacatatttaccaaagcaaccagaaggtgttattctgttctattcaaagggacctaaatctaacattgattttaaaattaaaaaggaaaatactatagaccaaactgcaaatgtagtatttaggtacatgtccagtgaaccaattatctttggagaatcgtctatctttgtagagtataagaaatttagcaacgataaaggctttcctaaagaatatggttctggtaagattgtgttatataacggcgttaattatctaaataatatctattgtttggaatatattaatacacataatgaagtgggtattaagtccgtggttgtacctattaagtttatagcagaattcttagttaatggagaaatacttaaacctagaattgataaaaccatgaaatatattaactcagaagattattatggaaatcaacataatatcatagtcgaacatttaagagatcaaagcatcaaaataggagatatctttaacgaggataaactatcggatgtgggacatcaatacgccaataatgataaatttagattaaatccagaagttagttattttacgaataaacgaactagaggaccgttgggaattttatcaaactacgtcaagactcttcttatttctatgtattgttccaaaacatttttagacgattccaacaaacgaaaggtattggcgattgattttggaaacggtgctgacctggaaaaatacttttatggagagattgcgttattggtagcgacggatccggatgctgatgctatagctagaggaaatgaaagatacaacaaattaaactctggaattaaaaccaagtactacaaatttgactacattcaggaaactattcgatccgatacatttgtctctagtgtcagagaagtattctattttggaaagtttaatatcatcgactggcagtttgctatccattattcttttcatccgagacattatgctaccgtcatgaataacttatccgaactaactgcttctggaggcaaggtattaatcactaccatggacggagacaaattatcaaaattaacagataaaaagacttttataattcataagaatttacctagtagcgaaaactatatgtctgtagaaaaaatagctgatgatagaatagtggtatataatccatcaacaatgtctactccaatgactgaatacattatcaaaaagaacgatatagtcagagtgtttaacgaatacggatttgttcttgtagataacgttgatttcgctacaattatagaacgaagtaaaaagtttattaatggcgcatctacaatggaagatagaccgtctacaaaaaactttttcgaactaaatagaggagccattaaatgtgaaggtttagatgtcgaagacttacttagttactatgttgtttatgtcttttctaagcggtaaataataatatggtatgggttctgatatccccgttctaaatgcattaaataattccaatagagcgatttttgttcctataggaccttccaactgtggatactctgtattgttaatagatatattaatacttttgtcgggtaacagaggttctacgtcttctaaaaataaaagtttgataacatctggcctgttcataaataaaaacttggcgattctatatatactcttattatcaaatctagccattgtcttatagatgtgagctactgtaggtgtaccatttgattttctttctaatactatatatttctctcgaagaagttcttgcacatcatctgggaataaaatactactgttgagtaaatcagttattttttttatatcgatattgatggacatttttatagttaaggataataagtatcccaaagtcgataacgacgataacgaagtatttatacttttaggaaatcacaatgactttatcagattaaaattaacaaaattaaaggagcatgtatttttttctgaatatattgtgactccagatacatatggatctttatgcgtcgaattaaatgggtctagttttcagcacggtggtagatatatagaggtggaggaatttatagatgctggaagacaagttagatggtgttctacatccaatcatatatctaaagatatacccgaagatatgcacactgataaatttgtcatttatgatatatacacttttgacgctttcaagaataaacgattggtattcgtacaggtacctccgtcgttaggagatgatagtcatttgactaatccgttattgtctccgtattatcgtaattcagtagccagacaaatggtcaataatatgatttttaatcaagattcatttttaaaatatttattagaacatctgattagaagccactatagagtttctaaacatataacaatagttagatacaaggataccgaagaattaaatctaacgagaatatgttataatagagataagtttaaggcgtttgtattcgcttggtttaacggcgtttcggaaaatgaaaaggtactagatacgtataaaaaggtatctaatttgatataatgaattcagtgactgtatcacacgcgccatatactattacttatcacgatgattgggaaccagtaatgagtcaattggtagagttttataacgaagtagccagttggctgctacgagacgagacgtcgcctattcctgataagttctttatacagttgaaacaaccgcttagaaataaacgagtatgtgtgtgcggtatagatccgtatccgaaagatggaactggtgtaccgttcgaatcaccaaattttacaaaaaaatcaattaaggagatagcttcatctatatctagattaaccggagtaattgattataaaggttataaccttaatataatagacggggttataccctggaattattacttaagttgtaaattaggagaaacaaaaagtcacgcgatctactgggataagatttccaagttactgctgcagcatataactaaacacgttagtgttctttattgtttgggtaaaacagatttctcgaatatacgggcaaagttagaatccccggtaactaccatagtcggatatcatccagcggctagagaccgccaattcgagaaagatagatcatttgaaattatcaacgttttactggaattagacaacaaggcacctataaattgggctcaagggtttatttattaatgctttagtgaaattttaacttgtgttctaaatggatgcggctattagaggtaatgatgttatctttgttcttaagactataggtgtcccgtcagcgtgcagacaaaatgaagatccaagatttgtagaagcatttaaatgcgacgagttagaaagatatattgagaataatccagaatgtacactattcgaaagtcttagggatgaggaagcatactctatagtcagaattttcatggatgtagatttagacgcgtgtctagacgaaatagattatttaacggctattcaagattttattatcgaggtgtcaaactgtgtagctagattcgcgtttacagaatgcggtgccattcatgaaaatgtaataaaatccatgagatctaatttttcattgactaagtctacaaatagagataaaacaagttttcatattatctttttagacacgtataccactatggatacattgatagctatgaaacgaacactattagaattaagtagatcatctgaaaatccactaacaagatcgatagacactgccgtatataggagaaaaacaactcttcgggttgtaggtactaggaaaaatccaaattgcgacactattcatgtaatgcaaccaccgcatgataatatagaagattacctattcacttacgtggatatgaacaacaatagttattacttttctctacaacaacgattggaggatttagttcctgataagttatgggaaccagggtttatttcattcgaagacgctataaaaagagtttcaaaaatattcattaattctataataaactttaatgatctcgatgaaaataattttacaacggtaccactggtcatagattacgtaacaccttgtgcattatgtaaaaaacgatcgcataaacatccgcatcaactatcgttggaaaatggtgctattagaatttacaaaactggtaatccacatagttgtaaagttaaaattgttccgttggatggtaataaactgtttaatattgcacaaagaattttagacactaactctgttttattaaccgaacgaggagaccatatagtttggattaataattcatggaaatttaacagcgaagaacccttgataacaaaactaattttgtcaataagacatcaactacctaaggaatattcaagcgaattactctgtccgaggaaacgaaagactgtagaagctaacatacgagacatgttagtagattcagtggagaccgatacctatccggataaacttccgtttaaaaatggtgtattggacctggtagacggaatgttttactctggagatgatgctaaaaaatatacgtgtactgtatcaaccggatttaaatttgacgatacaaagttcgtcgaagacagtccagaaatggaagagttaatgaatatcattaacgatatccaaccattaacggatgaaaataagaaaaatagagagctatatgaaaaaacattatctagttgtttatgcggtgctaccaaaggatgtttaacattcttttttggagaaactgcaactggaaagtcgacaaccaaacgtttgttaaagtctgctatcggtgacctgtttgttgagacgggtcaaacaattttaacagatgtattggataaaggacctaatccatttatcgctaacatgcatttgaaaagatctgtattctgtagcgaactacctgattttgcatgtagtgggtcaaagaaaatcagatctgataatattaaaaagttgacagaaccttgtgtcattggaagaccgtgtttctccaataaaattaataatagaaaccatgcgacaatcattatcgatactaattacaaacctgtttttgataggatagataacgcattaatgagaagaattgccgtcgtgcgattcagaacacacttttctcaaccttctggtagagaggctgctgaaaataatgacgcgtacgataaagtcaaactattagacgaggggttagatggtaaaatacaaaataatagatatagattcgcatttctatacttgttggtgaaatggtacagaaaatatcatgttcctattatgaaactatatcctacacccgaagagattcctgactttgcattctatctcaaaataggtactctgttggtatctagctctgtaaagcatattccattaatgacggacctctccaaaaagggatatatattgtacgataatgtggtcactcttccgttgactactttccaacagaaaatatccaagtattttaattctagactatttggacacgatatagagagcttcatcaatagacataagaaatttgccaatgttagtgatgaatatctgcaatatatattcatagaggatatttcatctccgtaaatatatgctcatatatttatagaagatatcacatatctaaatgaataccggaatcatagatttatttgataatcatgttgatagtataccaactatattacctcatcagttagctactctagattatctagttagaactatcatagatgagaacagaagcgtgttattgttccatattatgggatcaggtaaaacaataatcgctttgttgttcgccttggtagcttccagatttaaaaaggtttacattctagtgccgaacatcaacatcttaaaaattttcaattataatatgggtgtagctatgaacttgtttaatgacgaattcatagctgagaatatctttattcattccacaacaagtttttattctcttaattataacgataacgtcattaattataacggattatctcgctacaataactctatttttatcgttgatgaggcacataatatctttgggaataatactggagaacttatgaccgtgataaaaaataaaaacaagattccttttttactattgtctggatctcccattactaacacacctaatactctgggtcatattatagatttaatgtccgaagagacgatagattttggtgaaattattagtcgtggtaagaaagtaattcagacacttcttaacgaacgcggtgtgaatgtacttaaggatttgcttaaaggaagaatatcatattacgaaatgcctgataaagatctaccaacgataagatatcacggacgtaagtttctagatactagagtagtatattgtcacatgtctaaacttcaagagagagattatatgattactagacgacagctatgttatcatgaaatgtttgataaaaatatgtataacgtgtcaatggcagtattgggacaacttaatctgatgaataatttagatactttatttcaggaacaggataaggaattgtacccaaatctgaaaataaataatggcgtgttatacggagaagaattggtaacgttaaacattagttccaaatttaaatactttattaatcggatacagacactcaacggaaaacattttatatacttttctaattctacatatggcggattggtaattaaatatatcatgctcagtaatggatattctgaatataatggttctcagggaactaatccacatatgataaacggcaaaccaaaaacatttgctatcgttactagtaaaatgaaatcgtctttagaggatctattagatgtgtataattctcctgaaaacgatgatggtagtcaattgatgtttttgttttcatcaaacattatgtccgaatcctatactctaaaagaggtaaggcatatttggtttatgactatcccagatactttttctcaatacaaccaaattcttggacgatctattagaaaattctcttacgccgatatttctgaaccagttaatgtatatcttttagccgccgtatattccgatttcaatgacgaagtgacgtcattaaacgattacacacaggatgaattaattaatgttttaccatttgacatcaaaaagctgttgtatctaaaatttaagacgaaagaaacgaatagaatatactctattcttcaagagatgtctgaaacgtattctcttccaccacatccatcaattgtaaaagttttattgggagaattggtcagacaatttttttataataattctcgtattaagtataacgataccaagttacttaaaatggttacatcagttataaaaaataaagaagacgctaggaattacatagatgatattgtaaacggtcacttctttgtatcgaataaagtatttgataaatctcttttatacaaatacgaaaacgatattattacagtaccgtttagactttcctacgaaccatttgtttggggagttaactttcgtaaagaatataacgtggtatcttctccataaaactgatgagatatataaagaaataaatgtcgagctttgttaccaatggatacctttccgttacattggaaccacacgagctgacgttagacataaaaactaatattaggaatgccgtatataagacgtatctccatagagaaattagtggtaaaatggccaagaaaatagaaattcgtgaagacgtggaattacctctcggcgaaatagttaataattctgtagttataaacgttccgtgtgtaataacctacgcgtattatcacgttggggatatagtcagaggaacattaaacatcgaagatgaatcaaatgtaactattcaatgtggagatttaatctgtaaactaagtagagattcgggtactgtatcatttagcgattcaaagtactgcttttttcgaaatggtaatgcgtatgacaatggcagcgaagtcactgccgttctaatggaggctcaacaaggtatcgaatctagttttgtttttctcgcgaatatcgtcgactcataaaaaagagaatagcggtaagtataaacacgaatactatggcaataattgcgaatgttttattctcttcgatatatttttgataatatgaaaaacatgtctctctcaaatcggacaaccatctcataaaatagttctcgcgcgctggagaggtagttgccgctcgtataatctctccagaataatatacttgcgtgtcgtcgttcaatttatacggatttctatagttctctgttatataatgcggtttgccctcatgattagacgacgacaatagtgttctaaatttagatagttgatcagaatgaatgtttattggcgttggaaaaattatccatacagcgtctgcagagtggttgatagttgttcctagatatgtaaaataatccaacttactaggcagcaaattgtctagataaaatactgaatcaaacggtgcagacgtattggcggatctaatggaatccaattgattaactatcttttgaaaatatacatttttatgatccaatacttgtaagaatatagaaataatgataagtccatcatcgtgtttttttgcctcttcataagaactatattttttcttattccaatgaacaagattaatctctccagagtatttgtacacatctatcaagtgattggatccataatcgtcttcctttccccaatatatatgtagtgatgataacacatattcattggggagaaaccctccacttatatatcctcctttaaaattaatccttactagttttccagtgttctggatagtggttggtttcgactcattataatgtatgtctaacggcttcaatcgcgcgttagaaattgcttttttagtttctatattaataggagatagttgttgcggcatagtaaaaatgaaatgataactgtttaaaaatagctcttagtatgggaattacaatggatgaggaagtgatatttgaaactcctagagaattaatatctattaaacgaataaaagatattccaagatcaaaagacacgcatgtgtttgctgcgtgtataacaagtgacggatatccgttaataggagctagaagaacttcattcgcgttccaggcgatattatctcaacaaaattcagattctatctttagagtatccactaaactattacggtttatgtactacaatgaactaagagaaatctttagacggttgagaaaaggttctatcaacaatatcgatcctcactttgaagagttaatattattgggtggtaaactagataaaaaggaatctattaaagattgtttaagaagagaattaaaagaggaaagtgatgaacgtataacagtaaaagaatttggaaatgtaattctaaaacttacaacacgggataaattatttaataaagtatatataagttattgcatggcgtgttttattaatcaatcgttggaggatttatcgcatactagtatttacaatgtagaaattagaaagattaaatcattaaatgattgtattaacgacgataaatacgaatatctgtcttatatttataatatgctagttaatagtaaatgaacttttacagatctagtataattagtcagattattaagtataatagacgactagctaagtctattatttgcgaggatgactctcaaattattacactcacggcattcgttaaccaatgcctatggtgtcataaacgagtatccgtgtccgctattttattaactactgataacaaaatattagtatgtaacagacgagatagttttctctattctgaaataattagaactagaaacatgtttagaaagaaacgattatttctgaattattccaattatttgaacaaacaggaaagaagtatactatcgtcatttttttctctagatccagctactactgataatgatagaatagacgctatttatccgggtggcatacccaaaaggggtgagaatgttccagagtgtttatccagggaaattaaagaagaagttaatatagacaattcttttgtattcatagacactcggttttttattcatggcatcatagaagataccattattaataaattttttgaggtaatcttctttgtcggaagaatatctctaacgagtgatcaaatcattgatacatttaaaagtaatcatgaaatcaaggatctaatatttttagatccgaattcaggtaatggactccaatacgaaattgcaaaatatgctctagatactgcaaaacttaaatgttacggccatagaggatgttattatgaatcattaaaaaaattaactgaggatgattgattaaaaaatataaattaatttaccatcgtgtatttttataacgggattgtccggcatatcatgtagatagttaccgtctacatcgtatactcgaccatctacgcctttaaatcctctatttattgacattaatctattagaattggaataccaaatattagtaccctcaattagtttattggtaatattttttttagacgatagatcgatggctcttgaaaccaaggttttccaaccggactcattgtcgatcggtgagaagtctttttcattagcatgaatccattctaatgatgtatgtttaaacactctaaacaattggacaaattcttttgatttgctttgaatgatttcaaataggtcttcgtctacagtaggcataccattagataatctagccattataaagtgcacgtttacatatctacgttctggaggagtaagaacgtgactattgagacgaatggctcttcctactatctgacgaagagacgcctcgttccatgtcatatctaaaatgaagatatcattaattgagaaaaaactaataccctcgcctccactagaagagaatacgcatgttttaatgcattctccgttagtgtttgattcttggttaaactcagccaccgccttgattctagtatcttttgttctagatgagaactctatattagagataccaaagactttgaaatatagtaataagatttctattcctgactgattaacaaatggttcaaagactagacatttaccatgggatgctaatattcccaaacatacatctataaatttgacgcttttctcttttaattcagtaaatagagagatatcagccgcactagcatcccctttcaatagttctccctttttaaaggtatctaatgcggatttagaaaactctctatctcttaatgaatttttaaaatcattatatagtgttgctatctcttgcgcgtattcgcccggatcacgattttgtctttcaggaaagctatcgaacgtaaacgtagtagccatacgtctcagaattctaaatgatgatatacctgtttttatttcagcgagtttagccttttgataaatttcttcttgctttttcgacatattaacgtatcgcattaatactgttttcttagcgaatgatgcagacccttctacgtcatcaaaaatagaaaactcgttattaactatatacgaacatagtcctcctagtttggagactaattctttttcatcgactagacgtttattctcaaatagtgattggtgttgtaaggatcctggtcgtagtaagttaaccaacatggtgaattcttgcacactattgacgataggtgtagccgataaacaaatcatcttatggttttttaacgcaatggtcttagataaaaaattatatactgaacgagtaggacggatcttaccatcttctttgattaatgatttagaaatgaagttatgacattcatcaatgatgacgcatattctactcttggaattaatagttttgatattagtaaaaaatttatttctaaaattttgatcatcgtaattaataaaaatacaatccttcgttatctctggagcgtatctgagtatagtgttcatccaaggatcttctatcaaagcctttttcaccaataagataatagcccaattcgtataaatatccttaagatgtttgagaatatatacagtagtcattgttttaccgacacccgtttcatggaacaataaaagagaatgcatactgtctaatcctaagaaaactcttgctacaaaatgttgataatccttgaggcgtactacgtccgaccccatcatttcaacgggcatattagtagttctgcgtaaggcataatcgatataggccgcgtgtgatttactcatttatgagtgataagtaataactatgttttaaaaatcacagcagtagtttaactagtcttctctgatgtttgttttcgatactttttgaatcagaagtcatactagaataaagcaacgagtgaacgtaatagagagcttcgtatactctattcgaaaactctaagaacttattaatgaattccgtatccactggattgtttaaaatactaaattgaacactgttcacatccttccaagaagaagacttagtgacggacttaacatgagacataaataaatccaaattttttttacaaacatcactagccaccataatggcgctatctttcaaccagctatcgcttacgcattttagcagtctaacatttttaaagagactacaatatattctcatagtatcgattacacctctaccgaataaagttggaagtttaataatacaatatttttcgtttacaaaatcaaataatggtcgaaacacgtcgaaggttaacatcttataatcgctaatgtatagattgttttcagtgagatgattattagatttaatagcatctcgttcacgtttgaacagtttattgcgtgcgctgaggtcggcaactacggcgtccgctttagtactcctcccataatactttacgctattaatctttaaaatttcatagactttatctagatcgctttctggtaacatgatatcatgtgtaaaaagttttaacatgtcggtcggcattctatttagatcattaactctagaaatctgaagaaagtaattagctccgtattccagactaggtaatgggcttttacctagagacagattaagttctggcaatgtttcataaaatggaagaaggacatgcgttccctcccggatattttttacaatttcatccatttacaactctatagtttgttttcattattattagttattatctcccataatcttggtaatacttaccccttgatcgtaagataccttatacaggtcattacatacaactaccaattgtttttgtacataatagattggatggttgacatccatggtggaataaactactcgaacagatagtttatctttccccctagatacattagccgtaatagttgtcggcctaaagaatatctttggtgtaaagttaaaagttagggttcttgttccattattgctttttgtcagtagttcattataaattctcgagatgggtccgttctctgaatatagaacatcatttccaaatctaacttctagtctagaaataatatcggtcttattcttaaaatctattcccttgatgaagggatcgttaatgaacaaatccttggcctttgattcggctgatctattatctccgttatagacgttacgttgactagtccaaagacttacaggaatagatgtatcgatgatgttgatactatgtgatatgtgagcaaagattgttctcttagtggcatcactatatgttccagtaatggcggaaaactttttagaaatgttatatataaaagaattttttcgtgttccaaacattagcagattagtatgaagataaacactcatattatcaggaacattatcaatttttacatacacatcagcatcttgaatagaaacgataccatcttctggaacctctacgatctcggcagactccggataaccagtcggtggaccatcgctaacaataactagatcatccaacaatctactcacatatgcatctatataatctttttcatcttgtgagtaccctggatacgaaataaatttattatccgtatttccataataaggtttagtataaacagagagagatgttgccgcatgaacttcagttacagtcgccgttggttggtttatttgacctattactctcctaggtttctctataaacgatggtttaatttgtacattcttaaccatatatccaataaagctcaattcaggaacataaacaaattctttgttgaacgtttcaaagtcgaacgaagagtcacgaataacgatatcggatactggattgaaggttaccgttacggtaatttttgaatcggatagtttaagactgctgaatgtatcttccacatcaaacggagttttaatataaacgtatactgtagatggttctttaatagtgtcattaggagttaggccaatagaaatatcattaagttcactagaatatccagagtgtttcaaagcaattgtattattgatacaattattatataattcttcgccctcaatttcccaaataacaccgttacacgaagagatagatacgtgattaatacatttatatccaacatatggtacgtaactgaatcttcccatacctttaacttctggaagttccaaactcagaaccaaatgattaagcgcagtaatatactgatccctaatttcgaagctagcgatagcctgattgtctggaccatcgtttgtcataactccggatagagaaatatattgcggcatatataaagttggaatttgactatcgactgcgaagacattagaccgtttaatagagtcatccccaccgatcaaagaattaatgatagtattattcattttctatttaaaatggaaaaagcttacaataaactccgtagagaaatatctataatttgtgagttttccttaaagtaacagcttccgtaaacgccgtctttatctcttagtaggtttattgtatttatgaccttttccttatcttcatagaatactaaaggcaacaaagaaatttttggttcttctctaagagctacgtgagacttaaccatagaagccaacgaatccctacatattttagaacagaaataccctacttcaccacccttgtatgtctcaatactaataggtctaaaaaccaaatcttgattacaaaaccaacacttatcaattacactatttgtcttaatagacacatctgccatagatttataatactttggtagtatacaagcgagtgcttcttctttagcgggcttaaagactgctttaggtgctgaaataaccacatctggaaggcttactcgcttagccatttaattacggaactatttttttatacttctaatgagcaagtagaaaacctctcatctacaaaaacgtactcgtgtccataatcctctaccatagttacacgttttttagatctcatatgtgctaaaaagttttcccatactaattggttactattatttttcgtataatttttaacagtttgaggttttagatttttagttacagaagtgatatcgaatattttatccaaaaagaatgaataattaattgtcttagaaggagtgttttcttggcaaaagaataccaagtgcttaaatatttctactacttcattaatcttttctgtactcagattcagtttctcatcttttacttgattgattatttcaaagactaacttataatcctttttatttattctctcgttagccttaagaaaactagatacaaaatttgcatctacatcatccgtggatatttgatttttttccatgatatccaagagttccgagataatttctccagaacattgatgagacaataatctccgcaatacatttctcaaatgaataagtttattagacacgtggaagtttgactttttttgtacctttgtacatttttgaaataccgactcgcaaaaaatacaatattcatatccttgttcagatactataccgttatgtctacaaccgctacataatcgtagattcatgttaacactctacgtatctcgtcgtccaatattttatataaaaacattttatttctagacgttgccagaaaatcctgtaatatttttagttttttgggctgtgaataaagtatcgccctaatattgttaccgtcttccgccaatatagtagttaaattatccgcacatgcagaagaacaccgcttaggcggattcagtacaatgttatatttttcgtaccaactcatttaaatatcataatctaaaatagttctgtaatatgtctagcgctaatatattgatcataatcctgtgcataaattaagatacaacaatgtctcgaaatcatcgacatggcttcttccatagttagaagatcgtcgtcaaagttagcaacgtgattcatcaacatttgctgttttgaggcagcaaatactgaaccgtcgccattcaaccattcataaaaaccatcgtctgaatccattgataatttcttgtactggtttttgagagctcgcatcaatctagcatttctagctcccggattgaaaacagaaagaggatcgtacatccagggtccattttctgtaaatagaatcgtataatgtcccttcaagaagatatcagacgatccacaatcaaagaattggtctccgagtttgtaacagacagcggactttaacctatacatgataccgtttagcataatttctggtgatacgtcaatcggagtatcatctattagagatctaaagccggtgtaacattctccaccaaacatattcttattctgacgtcgttctacataaaacatcattgctccattaacgataacaggggaatgaacagcactacccatcacattagttcccaatggatcaatgtgtgtaactccagaacatcttccatagcctatgttaggaggagcgaacaccactcttccactattgccatcgaatgccatagaataaatatccttggaattgatagaaatcggactgtcggatgttgtgatcatcttcataggattaacaactatgtatggtgccgcctgaagtttcatatcgtaactgatgccgtttataggtctagccacagaaaccaacgtaggtctaaatccaactatagacaaaatagaagccaatatctgttcctcatctgtcataacttgagagcatccagtatgaataatcttcattagatggggatctaccgcatcatcatcgttacaataaaaaattcccattctaatgttcataattgcttttctaatcatggtatgcatgtttgctctctgaatctctgtggaaattagatctgatacacctgtaatcactatcggattatcctccgtaagacgattaaccaacaacatataattataagactttacttttctaaattcataaagttgctggattaggctataggtgtctccatgtacatacgcgttctcgagcgcaggaagtttaataccgaatagtgccatcagaataggatgaatatagtaattagtttctggttttctataaataaaagacaaatcttgtgaactagacatatcggtaaaatgcatggattggaatcgtgtagtcgacagaagaatatgatgattagatggagagtatattttatctaactctttgagttggtcaccgattctaggactagctcgagaatgaataagtactaaaggatgagtacatttcacagaaacactagcattgttcaatgtgctctttacatgggtaaggagttgaaatagctcgtttctatttgttctgacaatatttagtttattcataatgttaagcatatcctgaatagtaaagttagatgtgtcatacttgttagtagttagatatttagcaattgcattcccatcatttctcaatctcgtactccaatcatgcgtagatgctacttcatctatagaaaccatacaatcctttttgataggctgttgagattgattatttcctgcacgtttaggtttggtacgttgatttctagcccctgcggatataaagtcatcgtctacaatttgggacaatgaattgcatacactacaagacaaagatttatcagaagtgtgaatatgatcttcatctaccaaagaaagagtttgattagtataactagattttagtcctgcgttagatgttaaaaaaacatcgctattgaccacggcttccattatttatattcgtagtttttactcgaaagcgtgattttaatatccaatcttattacttttggaatcgttcaaaacctttgactaattgtagaatttgatctattgccctacgcgtatactcccttgcatcatatacgttcgtcaccagatcgtttgtttcggcctgaagttggtgcatatctctttcaacattcgacatgagatccttaagggccatatcgtctagattttgttgagatgctgctcctggatttggattttgttgtgctgttgtacatactgtaccaccagtaggtgtaggagtacatacagtggccacaataggaggttgaggaggtgtaaccgttggagtagtacaagaaatacttccatccgattgttgtgtacatgtagttgttggtaacgtctgagaaggttgggtagatggcggcgtcgtcgttttttgatctttattaaatttagagataatatcctgaacagcattgctcggcgtcaacgctggaaggagtgaactcgccggcgcatcagtatcttcagacagccaatcaaaaagattagacatatcagatgatgtattagtttgttgtcgtggttttggtgtaggagcagtactactaggtagaagaataggagccggtgtagctgttggaaccggctgtggagttatatgaatagttggttgtagcggttggataggctgtctgctggcggccatcatattatctctagctagttgttctcgcaactgtctttgataatacgactcttgagactttagtcctatttcaatcgcttcatcctttttcgtatccggatccttttcttcagaataatagattgacgactttggtgtagaggattctgccagcctctgtgagaacttgttaaagaagtccatttaaggctttaaaattgaattgcgattataagattaaatggcagacacagacgatattatcgactatgaatccgatgatctcaccgaatacgaggatgatgaagaagaggaagaagatggagagtcactagaaactagtgatatagatcccaaatcttcttataagattgtagaatcagcatccactcatatagaagatgcgcattctaatcttaaacatatagggaatcatatatctgctcttaaacgacgctatactagacgtataagtctatttgaaatagcgggtataatagcagaaagctataacttgcttcaacgaggaagattacctctagtttcagaattttctgacgaaacgatgaagcaaaatatgctacatgtaattatacaagagatagaggagggttcttgtcctatagtcatcgaaaagaacggagaattgttgtcggtaaacgattttgacaaagatggtctaaaattccatctagactatattatcaaaatttggaaacttcaaaaacgatattagaatttatacgaatatcgttctctaaatgtcacaatcaagtctcgcatgttcagcaatttattgtcgtactttatatcgtgttcattaacgatatcttgcaaaatagtaatgattctatcttccttcgatagatattcttcagagattattgtcttatattctttcttgttatccgatatgaatttgataagactttgaacattattgatacccgtctgtttaattttttctacagatattttagttttggcagattctatcgtatctgtcaatagacatccaacatcgacattcgacgtcaattgtctataaatcaacgtataaattttagaaataacattagcgaattgttgtgcgttgatgtcgttattctgaaacagtatgattttaggtagcattttcttaacaaagagaacgtatttattgttactcagttgaacagatgatatatccagattactaacgcatctgattccgtataccaaactttcagaagaaatggtgtacaattgtttgtattcattcaatgtctctttttcagaaattagtttagagtcgaatactgcaataattttcaagagatagttttcatcagataagattttatttagtgtagatatgataaaactattgttttgttggagaacttgatacgccgcgttctctgtagtcgacgctctcaaatgggaaacaatctccattatttttttggaatcggatacaatatcttcggtatcttgacgcagtctagtatacatagagttaagagagattagagtttgtacattaagcaacatgtctctaaatgtggctacaaacttttcctttttcacatcatctagtttattatataccgatttcacaacggcaccagatttaaggaaccagaatgaaaaactctgataactacaatatttcatcatagttacgattttatcatcttctatagttggtgtaatagcgcatacctttttctccaagactggaaccaacgtcataaaaatgtttaaatcaaaatccatatcaacatctgatgcgctaagaccagtctcgcgttcaagattatctttactaatggtgacgaactcatcgtataaaactctaagtttgtccattatttatttacagatttagttgtttaatttatttgtgctcttccagagttgggatagtatttttctaacgtcggtattatattattaggatctacgttcatatgtatcataatattaatcatccacgttttgataaatctatctttagcttctgaaataacgtatttaaacaaaggagaaaaatatttagctacggcatcagacgcaataacattttttgtaaatgtaacgtatttagacgacagatcttcgttaaaaagttttccatctatgtagaatccatcggttgttaacaccattcccgcgtcagattgaataggagtttgaatagtttgttttggaaatagatccttcaataacttatagttgggtgggaaaaaatcgattttatcactagactctttcttttttactatcattacctcatgaactatttcttgaatgagtatatgtattttctttcctatatcggacgcgttcattggaaaatataccatgtcgttaactataagaatatttttatcctcgtttacaaactgaataatatcagatgtagttcgtaaacgaactatatcatcaccagcacaacatctaactatatgatatccactagtttcctttagccgtttattatcttgttccatattagcagtcattccatcatttaagaaggcgtcaaagataatagggagaaatgacattttggattctgttacgactttaccaaaattaaggatatacggacttactatctttttctcaacgtcaatttgatgaacacacgatgaaaatgtgcttctatgagattgatcatgtagaaaacaacaagggatacaatatttccgcatatcatgaaatatattaagaaatcccaccttattatatttccccaaaggatccatgcacgtaaacattatgccgttatcattaataaagacttctttctcatcggatctgtaaaagttgttactgatttttttcattccaggatctagataattaataatgatgggttttctattcttattctttgtattttggcatatcctagaccagtaaacagtttccactttggtaaaatcagcagacttttgaacgctattaaacatggcattaatggcaataactaaaaatgtaaaatatttttctatgttaggaatatggtttttcactttaatagatatatggtttttggccaaaatgatagatatttttttatccgaggatagtaaaatattattagtcgccgtctctataaaaatgaagctagtctcgatatccaattttattctagaattgataggagtcgccaaatgtaccttatacgttatatctcccttgatgcgttccatttgtgtatctatatcggacacaagatctgtaaatagttttacgttattaatcatcacggtatcgccgtcgctagataacgctaatgtaccatccaagtcccaaatggagagatttaactgttcatcgtttagaataaaatgattaccggtcatattaataaagtgttcatcgtatctagataacaacgacttataattaatgtccaagtcttgaactcgctgaatgatcttttttaacccagttagttttagattggtacgaaatatattgttaaactttgattctacagtaatgtccaaatctagttgtggaaatacttccatcaacattgtttcaaacttgataatattattatctacatcttcgtacgatccaaattccggaatagatgtatcgcacgctctggccacccagataaccaaaaagtcacacgctccaggatatacattgtataaaaagctatcgttttttagtagggtttttttctgcgtgtatacgaagggattaaaaatagtattatcaacgtaactatattccaaattattcttatgagaatagataataatatcgtccttaatatctaacaaatttcctaaatatccctttaattgagtcattcgaagcgtcaatagaatatgtctcttaactatttccggctgttgtatatttaaatgacttcgtaaaaaataatatatgggcgacttctcatctatgtaatcatatggagtgagatatagggctcgttctacctcctgccccttacccacctgtaataccaattgcggacttactatatatcgcatatttatatcgtggggtaaagtgaaaatctactaccgatgatgtaagtcttacaatgttcgaaccagtaccagatcttaatttggaggcctccgtagaactaggggaggtaaatatagatcaaacaacacctatgataaaggagaatagcggttttatatcccgcagtagacgtctattcgcccatagatctaaggatgatgagagaaaactagcactacgattctttttacaaagactttattttttagatcatagagagattcattatttgttcagatgcgttgacgctgtaaaagacgtcactattaccaaaaaaaataacattatcgtggcgccttatatagcacttttaactatcgcatcaaaaggatgcaaacttacagaaacaatgattgaagcattctttccagaactatataatgaacatagtaagaaatttaaattcaactctcaagtatccatcatccaagaaaaactcggataccagtttggaaactatcacgtttatgattttgaaccgtattactctacagtagctctggctattcgagatgaacattcatctggcatttttaatatccgtcaagagagttatctggtaagttcattatctgaaataacatatagattttatctaattaatctaaaatctgatcttgttcaatggagtgctagtacgggcgctgtaattaatcaaatggtaaatactgtattgattacagtgtatgaaaagttacaactggtcatagaaaatgattcacaatttacatgttcattggctgtggaatcaaaacttccaataaaattacttaaagatagaaatgaattatttacaaaattcattaacgagttaaaaaagaccagttcattcaagataagcaaacgcgataaggatacgctactaaaatattttacttaggactggagttagaatttatagacgactcatttcgtttatcattgttactattattactattactatcattattagtgttggcattattagtattcttcttgtcatcttgttcagaaatatacagcaatgctatacctaatactaaatacattatcatgctcgcaatggctctaacaacaacgaaccaaaatgaatttggtcgtagcttttgttcacaaaaatacataaagaaatgtctacataaatctatggcgccattggctacttgaaatagcgccagtcctcctacagattttaatatagctgtataacatgacatttattcatcatcaaaagagacagagtcaccatctgtcatatttagattttttttcatgtgttcaaagtatcctctactcatttcattataatagtttatcatacttagaattttaggacggatcaatgagtaagacttgactagatcgtcagtagtaatttgtgcatcgtctattctgcatccgcttcgtcgaataatgtatagcatcgctttgagattctccatagctatcaagtctttatacaatgacatggaaatatctgtgaatactttatacttctccaacatcgatgccttaacatcatcgcctactttagcattgaaaatacgttctattgtgtagatggatgtagcaagatttttaaacaacaatgccatcttacacgatgattgcctcaagtctccaatcgtttgtttagaacgattagctacagagtccaatgcttggctgactagcatattattatctttagaaattgtattcttcaatgaggcgtttatcatatctgtgatttcgttagtcatattacagtctgactgggttgtaatgttatccaacatatcacctatggatacggtacacgtaccagcatttgtaataatcctatctaagatgttgtatggcattgcgcagaaaatatcttctcctgtaatatctccactctcgataaatctactcagattattcttaaatgccttattctctggagaaaagatatcagtgtccatcatttcattaatagtatacgcagaaaagataccacgagtatcaattctatccaagatacttatcggttccgagtcacagataatggtttcctctccttcgggagatcctgcatagaaatatctaggacaatagtttctatactgtctgtaactctgataatctctaaagtcactaactgataccatgaaattgagaagatcaaacgctgaagtaattaatttttctgcctcgtttttactacaactagttttcatcaatgtagtgacgatgtattgtttagttacttttggtctaatactgatgatagagatattattgcttcccataatggatcttctagtagtcaccttaaagcccattgatgcgaatagcagatagataaagtcttggtatgactcctttctaatatagtacggactacctttgtcacccaactttatacccacataagccataacaacctctttaatagccgtttcatgaggtttatcagccatgagcctgagtagttggaagaatctcatgaatcccgtctcagaaagtcctatatgcatgatagatttatctttcctgggaaactctcgtatagtcatagatgaaatactctttaaagtttctgaaataagattagtaacagtcttacctccgactactctaggtaacaaacaaactctaataggtgttttctctgcggagataatatcagaaaggatagagcaataagtagtattattgtgattataaagaccgaatacataacaggtagaatttataaacatcatgtcctgaaggtttttagacttgtattcctcgtaatccataccgtcccaaaacatggatttggtaactttgatagccgtagatctttgttccttcgccaacaggttaaagaaattaataaagaatttgttgtttctatttatgtccacaaattgcacgtttggaagcgccacggttacattcactgcagcattttgaggatcgcgagtatgaagtacgatgttattgtttactggtatatctggaaagaaatctaccagtctaggaataagagattgatatcgcatagaaatagtaaagtttataatctcatcatcgaagagcattttgttaccattgtaataaatatccactctgtcatatgtataaatgaagtactgttcaaacatgatgagatgtttatatgttggcatagtagtgagatcgacgtttggtaatggcaatgtattaagattaactccataatgtctagcagcatctgcgatgttataagcgtcgtcaaagcggggtcgatcttgtattgttatatattgtctaacacctataagattatcaaaatcttgtctgcttaatacaccgttaacaatttttgccttgaattcttttattggtgcattaataacatccttatagaggatgttaaacaaataagtgttatcaaagttaagatctggatatttcttttctgctagaacatccattgagtcggagccatctggtttaatataaccaccgataaatctagctctgtattctgtatccgtcaatctaatattaagaaggtgttgagtgaaaggtggaagatcgtaaaagctgtgagtattaatgataggattagtttccgaactaatgttaattggggtattaataatatctatatttccagcgttaagtgtaacattaaacagttttaattcacgtgacgtggtatcaattaaataattaatgcccaatttggatatagcagcctgaagctcatcttgtttagttacggatcctaatgagttattaagcaatatatcgaacggatgaacgaaggttgttttgagtttgtcgcatactttgtaatctagacatagatgcggaagaacggtagaaactatacgaaataaatattcagagtcctctaattgatcaagagtaactattgacttaataggcatcatttatttagtattaaatgacgaccgtaccagtgacggatatacaaaacgatttaattacagagttttcagaagataattatccatctaacaaaaattatgaaataactcttcgtcaaatgtctattctaactcacgttaacaacgtggtagatagagaacataatgccgccgtagtgtcatctccagaggaaatatcctcacaacttaatgaagatctatttccagatgatgattcaccggccactattatcgaacgagtacaacctcatactactattattgacgatactccacctcctacgtttcgtagagagttattaatatcggaacaacgtcaacaacgagaaaaaagatttaatattacagtatcgaaaaatgctgaagcaataatggaatctagatctatgataacttctatgccaacacaaacaccatccttgggagtagtttatgataaagataaaagaattcagatgttagaggatgaagtggttaatcttagaaatcaacgatctaatacaaaatcatctgataatttagataattttaccaaaatactatttggtaagactccgtacaaatcaacagaagttaataagcgtatagccatcgttaattatgcaaatttgaacgggtcccccttatcagtcgaggacttggatgtttgttcggaggatgaaatagatagaatctataaaacgattaaacaatatcacgaaagtagaaaacgaaaaattatcgtcactaacgtgattattattgtcataaacattatcgagcaggcattgctaaaactcggatttgaagaaatcaaaggactgagtaccgatatcacttcagaaattatcgatgtggagatcggagatgactgcgatgctgtagcatctaaactaggaatcggtaacagtccggttcttaatattgtattgtttatactcaagatattcgttaaacgaattaaaattatttaatttaatacattcccatatccagacaacaatcgtctggattaatctgttcctgtcgtctcataccggacgacatattaatctttttattagtgggcatctttttagatggtttctttttcccagcattaactgagtcgatacctagaagatcgtgattgatctctccgaccattccacgaacttctaattggccgtctctgacggtaccataaactattttaccagcattagtaacagcttggacaatctgaccatccatcgcattgtacgatgtagtagtaactgttgttctacgtctaggagcaccagaagtatttttggagcccttggatgttgatgtagaagaagacgaggattttgattttggtttacatgtaatacattttgaactctttgattttgtatcacatgcgccggcagtcacatctgtttgagaattaagattattgttgcctcctttgacggctgcatctccaccgatttgcgctagtagatttttaagctgtggtgtaatcttattaactgtttcgatataatcatcgtaactgcttctaacggctaaattttttttatccgccatttagaagctaaaaatatttttatttatgcagaagatttaactagattatacaatgaactaatatgatccttttccagattatttacaaacttggtattttttggttctggaggaggcgaatttaaattcggacttggattcggattttgtaagttcttgatcttattatacatcgagtataggatggcgacagtaactgctacacaaataccgatcaaaagaagaataccaatcatttattgacaataacttcactattgatcaagtatgcaatatatcatcttttcactaaataagtagtaataatgattcaacaatgtcgagatatatggacgataataatttagttcatggaaatatcgctatgattggtgtgaatgactccgctaactctgtggggtgcgcagtgctttccccacatagaataaattagcattccgactgtgataataataccaagtataaacgccataatactcaatactttccatgtacgagtgggactggtagacttactaaagtcaataaaggcgaagatacacgaaagaatcaaaagaatgattccagcgattagcacgccggaaaaataatttccaatcataagcatcatgtccatttaactaataaaaattttaaatcgccgaatgaacaaagtggaatataaaccatataaaaacaatagtttgtactgcaaaaataatatctatttttgttttcgaagatatggtaaaattaaatagtagtacacagcatgttataactaacagcagcaacggctcgtaattacttatcatttactagacgaaaaggtggtgggatattttcttgctcaaataatacgaatatatcacccatccattttatgcgatgtttatatactctaatctttaatagatctatagacgacgggtttaccaacaatatagattttatcgattcatctaatttaaacccttccttaaacgtgaatgatctattatctggcataacgatgaccctacctgatgaatcggacaatgtactgggccatgtagaataaattatcaacgaattatcgtctacgaacatttatatcatttgttttaattttaggacgcgaataaatggatataaaatagaaaataacagatattacaaccagtgttatggccgcgcccaaccaggtaggcagttttattttatcttttactacaggttctcctggatgtacgtcaccaacggcggacgtagttctagtacaattagacgtaagttccgcttgggaattttttaacgctaaagagttaacgttaatcgtgcacccaacgtatttacatctagttcgttgaacatcttgattataatataaccattttctatctctagattcgtcagtgcactcatgtaaccaacataccctaggtcctaaatatttatctccggaattagattttggataattcgcgcaccaacaatttctatttcctttatgatcgttacaaaagacgtataatgccgtatccccaaaagtaaaataatcaggacgaataattctaataaactcagaacaatatctcgcatccatatgtttggagcaaatatcggaataagtagacatagccggtttccgttttgcacgtaaccattctaaacaattggggtttccaggatcgtttctacaaaatccagtcatgaaatcgtcacaatgttctgtcttgtaattattattaaatatttttggacagtgtttggtatttgtcttagaacaacattttgccacgctatcactatcgcccaggagataatccttttttataaaatgacatcgttgcccggatgctatataatcagtagcgtgttttaaatccttaatatattcaggagttacctcgttctgataatagattaatgatccaggacgaaatttgaaagaactacatggttctccatgaattaatacatattgtttagcaaattcaggaactataaaactactacaatgatctatcgacataccatctatcaaacaaaacttgggtttaatttctcccggagatgtttcataatagtacgtataactttcttctgcaaacttaacagctctattatattcaggataattaaaacctaattccatatatttgtctcgtatatctgctattcctggtgctattttgattctattaagagtaacagctgcccccattcttaataatcgtcagtatttaaactgttaaatgttggtatatcaacatctaccttatttcccgcagtataaggtttgttgcaggtatactgttcaggaatggttacatttatacttcttctatagtcctgtctttcgatgttcatcacatatgcaaagaacagaataaacaaaataatgtaagaaataatattaaatatctgtgaattcgtaaatacattgattgccataataattacagcagctacaatacacacaatagacattcccacagtgttgccattacctccacgatacatttgagttactaagcaataggtaataactaagctagtaagaggcaatagaaaagatgagataaatatcatcaatatagagattagaggagggctatatagagccaagacgaacaaaatcaaaccgagtaacgttctaacatcattatttttgaagattcccaaataatcattcattcctccataatcgttttgcatcatacctccatctttaggcataaacgattgctgctgttcctctgtaaataaatctttatcaagcactccagcacccgcagagaagtcgtcaagcatattgtaatatcttaaataactcatttatatattaaaaaatgtcactattaaagatggagtataatctttatgccgaactaaaaaaaatgacttgtggtcaacccctaagtctttttaacgaagacggggatttcgtagaagttgaaccgggatcatcctttaagtttctgatacctaagggattttacgcctctccttccgtaaagacgagtctagtattcgagacattaacaacgaccgataataaaatcactagtatcaatccaacaaatgcgccaaagttatatcctcttcaacgcaaagtcgtatctgaagtagtttctaatatgaggaaaatgatcgaatcaaaacgtcctctatacattactcttcacttggcgtgtggatttggtaagactattaccacgtgttatcttatggctacacacggtagaaaaaccgtcatttgcgtacccaataaaatgttaatacatcaatggaagacacaggtagaggcagtcggattggaacataagatatccatagatggagtaagtagtctattaaaggaactaaagactcaaagtccggatgtattaatagtagtcagtagacatctgacaaacgatgccttttgtaaatatatcaataagcattatgatttgttcatcttggatgaatcacatacgtataatctgatgaacaatacagcagttacaagatttttagcgtattatcctccgatgatgtgttattttttaactgctacacctagaccatctaaccgaatttattgtaacagtattattaatattgccaagttatccaatctaaaaaaaactatctatgcagtagatagtttttttgagccatattccacagataatattagacatatggtaaaacgactagatggaccatctaataaatatcatatatataccgagaagttattatctgtagacgagcctagaaatcaacttattcttgataccctggtagaagaattcaagtcaggaactattaatcgcattttagttattactaaactacgtgaacatatggtattattctacaaacgattattagattttttcggaccagaggttgtatttataggagacgcccaaaatagacgtactccagatatggtcaaatcaatcaaggaactaaatagatttatattcgtatccaccttattttattccggtactggtttagatattcctagtttggattcgttgttcatttgctcggcagtaatcaacaatatgcaaatagagcaattactagggagggtatgtcgagaaacagaactattagataggacggtatatgtatttcctaacacatccatcaaagaaataaagtacatgataggaaatttcatgcaacgaattattagtctgtctgtagataaactaggatttaaacaaaaaagttatcggaaacatcaagaatccgatcccacttctgtatgtacaacatcctccagagaagaacgtgtattaaatagaatatttaactcgcaaaatcgttaagaagtttaagcgacgatccgcatgctgcgcaggccagtgtattacccctcatagtattaatataatccaatgatacttttgtgatgtcggaaatcttaaccaatttagactgacaggcagaacacgtcatgcaatcatcatcgtcatcgataactgtagtcttgggcttctttttgcgactcttcattccggaacgcacattggtgctatccatttaggtagtaaaaaataagtcagaatatgccctataacacgatcgtgcaaaacctggtatatcgtctctatctttatcacaatatagtgtatcgacatttttattattattgacctcgtttatcttggaacatggaatgggaacatttttgttatcaacggccatctttgccttaattccagatgttgtaaaattataactaaacagtctatcatcgacacaaatgaaattcttgtttagacgtttgtagtttacgtatgcggctcgttcgcgtctcattttttcagatattgcaggtactataatattaaaaataagaatgaaataacataggattaaaaataaagttatcatgacttctagcgctgatttaactaacttaaaagaattacttagtctgtacaaaagtttgagattttcagattctgcggctatagaaaagtataattctttggtagaatggggaacatctacttactggaaaataggcgtgcaaaaggtagctaatgtcgagacgtcaatatctgattattatgatgaggtaaaaaataaaccgtttaatattgatccgggctattacattttcttaccggtatattttgggagcgtctttatttattcgaagggtaaaaatatggtagaacttggatctggaaactcttttcaaataccagatgatatgcgaagtgcgtgtaacaaagtattagacagcgataacggaatagactttctgagatttgttttgttaaacaatagatggataatggaagatgctatatcaaaatatcagtctccagttaatatatttaaactagctagtgagtacggattaaacatacccaaatatttagaaattgaaatagaggaagacacattatttgacgacgagttatactctattatagaacgctctttcgatgataaatttccaaaaatatccatatcgtatattaagttgggagaacttagacggcaagttgtagactttttcaaattctcattcatgtatattgagtccatcaaggtagatcgtataggagataatatttttattcctagcgttataacaaaatcaggaaaaaagatattagtaaaagatgtagaccatttaatacgatccaaggttagagaacatacatttgtaaaagtaaaaaagaaaaacacattttccattttatacgactatgatggaaacggaacagaaactagaggagaagtaataaaacgaattatagacactataggacgagactattatgttaacggaaagtatttctctaaggttggtagtgcaggcttaaagcaattgactaataaattagatattaatgagtgcgcaactgtcgatgagttagttgatgagattaataaatccggaactgtaaaacgaaaaataaaaaaccaatcagcatttgatttaagcagagaatgtttgggatatccagaagcggattttataacgttagttaataacatgcggttcaaaatagaaaattgtaaggttgtaaatttcaatattgaaaatactaattgtttaaataacccgagtattgaaactatatatggaaactttaaccagttcgtctcaatctttaatgtcgtcaccgatgtcaaaaaaagattattcgagtgaaataatatgcgcctttgatataggtgcaaaaaatcctgccagaactgttttagaagtcaaggataactccgttagggtattggatatatcaaaattagactggagttctgattgggaaaggcgcatagctaaagatttgtcacaatatgaatacactacagttcttctagaacgtcagcctagaaggtcgccgtatgttaaatttatctattttattaaaggctttttatatcatacatcggctgccaaagttatttgcgtctcgcctgtcatgtctggtaattcatatagagatcgaaaaaagagatcggtcgaagcatttcttgattggatggacacattcggattgcgagactccgttccggatagacgcaaattagacgatgtagcggatagtttcaatttggctatgagatacgtattagataaatggaatactaattatacaccttataataggtgtaaatctagaaattacataaaaaaaatgtaataacgttagtaacgccattatggataatctatttacctttctacatgaaatagaagatagatatgccagaactatttttaactttcatctaataagttgcgatgaaataggagatatatatggtcttatgaaagaacgcatttcctcagaggatatgtttgataatatagtgtataataaagatatacatcctgccattaagaaactagtgtattgcgacatccaacttactaaacacattattaatcagaatacgtatccggtatttaacgattcttcacaagtgaaatgttgtcattatttcgacataaactcagataatagcaatattagctctcgtacagtagagatatttgagagggaaaagtcatctcttgtatcatatattaaaactaccaataagaagagaaaggtcaattacggcgaaataaagaaaactgttcatggaggcactaatgcaaattacttttccggtaaaaagtctgacgagtatctgagtactacagttagatccaacattaatcaaccttggatcaaaaccatctctaagaggatgagagttgatatcattaatcactctatagtaacgcgtggaaaaagctctatattacaaactatagaaattatttttactaatagaacatgtgtgaaaatattcaaggattctactatgcacattattctatccaaggacaaggatgaaaaggggtgtatacacatgattgacaaattattctatgtctattataatttatttctgttgttcgaagatatcatccaaaacgagtactttaaagaagtagctaatgttgtaaaccacgtactcacggctacggcattagatgagaaattattcctaattaagaaaatggctgaacacgatgtttatggagttagcaatttcaaaatagggatgtttaacctgacatttattaagtcgttggatcataccgttttcccctctctgttagatgaggatagcaaaataaagttttttaaggggaaaaagctcaatattgtagcattacgatctctggaggattgtataaattacgtgactaaatccgagaatatgatagaaatgatgaaggaaagatcgactattttaaatagcatagatatagaaacggaatcggtagatcgtctaaaagaattgcttctaaaatgaaaaaaaacactaattcagaaatggatcaacgactagggtataagtttttggtgcctgatcctaaagccggagttttttatagaccgttacatttccaatatgtatcgtattctaattttatattgcatcgattgcatgaaatcttgaccgtcaagcggccactcttatcgtttaagaataatacagaacgaattatgatagaaattagcaatgttaaagtgactcctccagattactcacctataatcgcgagtattaaaggtaagagttatgacgcattagccacgttcactgtaaatatctttaaagaggtaatgaccaaagagggtatatccatcactaaaataagtagttatgagggaaaagattctcatttgataaaaattccgctactaataggatacgggaataaaaatccacttgatacagccaagtatcttgttcctaatgtcataggtggagtctttatcaataaacaatctgtcgaaaaagtaggaattaatctagtagaaaagattacaacatggccaaaatttagggttgttaagccaaactcattcactttctcgttttcctccgtatcccctcctaatgtattaccgacaagatatcgccattacaagatatctctggatatatcacaattggaagcgttgaatatatcatcgacaaagacatttataacggtcaatattgttttgctgtctcaatatttatctagagtgagtctagaattcattagacgtagtttatcatacgatatgcctccagaagttgtctatctagtaaacgcgataatagatagtgctaaacgaattactgaatctattactgactttaatattgatacatacattaatgacctggtggaagctgaacacattaaacaaaaatctcagttaacgattaacgagttcaaatatgaaatgctgcataactttttacctcatatgaactatacacccgatcaactaaagggattttatatgatatctttactaagaaagtttctctactgtatcttccacacttctagatatccagatagagattcgatggtttgtcatcgcatcctaacgtacggcaaatattttgagacgttggcacatgatgaattagagaattacataggcaacatccgaaacgatatcatgaacaatcacaagaacagaggcacttacgcggtaaacattcatgtactaacaactcccggacttaatcacgcgttttctagcttattgagtggaaagttcaaaaagtcagacggtagttatcgaacacatcctcactattcatggatgcagaatatttctattcctaggagtgttggattttatccggatcaagtaaagatttcaaagatgttttctgtcagaaaataccatccaagtcaatatctttacttttgttcatcagacgttccggaaagaggtcctcaggtaggtttagtatctcaattgtctgtcttgagttccattacaaatatactaacgtctgagtatttggatttggaaaagaaaatttgtgagtatatcagatcatattataaagatgatataagttactttgaaacaggatttccaatcactatagaaaatgctctagtcgcatctcttaatccaaatatgatatgtgattttgtaactgactttagacgtagaaaacggatgggattcttcggtaacttggaggtaggtattactttagttagggatcacatgaatgaaattcgcattaatattggagcgggaagattagtcagaccattcttggttgtggataacggagagctcatgatggatgtgtgtccggagttagaaagcagattagacgacatgacattctctgacattcagaaagagtttccgcatgtcatcgaaatggtagatatagaacaatttacttttagtaacgtatgtgaatcggttcaaaaatttagaatgatgtcaaaggatgaaagaaagcaatacgatttatgtgactttcctgccgaatttagagatggatatgtagcatcttcactagtgggaatcaatcacaattctggacccagagctattcttggatgtgctcaagctaaacaagctatctcttgtctgagttcggatatacgaaataaaatagacaatggaattcatttgatgtatccagagaggccaatcgtgattagtaaggctttagaaacttcaaagattgcggctaattgcttcggccaacatgttactatagcattaatgtcgtacaaaggtatcaatcaagaggatggaattatcatcaaaaaacaatttattcagagaggcggtctcgatattgttacagccaagaaacatcaagtagaaattccattggaaaactttaataacaaagaaagagataggtctaacgcctattcaaaattagaaagtaatggattagttagactgaatgctttcttggaatccggagacgctatggcacgaaatatctcatcaagaactcttgaagatgattttgctagagataatcagattagcttcgatgtttccgagaaatataccgatatgtacaaatctcgcgttgaacgagtacaagtagaacttactgacaaagttaaggtacgagtattaaccatgaaagaaagaagacccattctaggagacaaatttaccactagaacgagtcaaaagggaacagtcgcgtatgtcgcggatgaaacggaacttccatacgacgaaaatggtatcacaccagatgtcattattaattctacatccatcttctctagaaaaactatatctatgttgatagaagttattttaacagccgcatattctgctaagccgtacaacaataagggagaaaaccgacctgtctgttttcctagtagtaacgaaacatccatcgatacatatatgcaattcgctaaacaatgttatgagcattcaaatccgaaattgtccgatgaagaattatcggataaaatcttttgtgaaaagattctctatgatcctgaaacggataagccttatgcatccaaagtattttttggaccaatttattacttgcgtctgaggcatttaactcaggacaaggcaaccgttagatgtagaggtaaaaagacgaagctcattagacaggcgaatgagggacgaaaacgtggaggaggtatcaagttcggagaaatggagagagactgtttaatagcgcatggtgcagccaatactattacagaagttttgaaagattcggaagaagattatcaagatgtgtatgtttgtgaaaattgtggagacatagcagcacaaatcaagggtattaatacatgtcttagatgttcaaaacttaatctctctcctctcttaacaaaaattgataccacgcacgtatctaaagtatttcttactcaaatgaacgccagaggcgtaaaagtcaaattagatttcgaacgaaggcctccttcgttttataaaccattagataaagttgatctcaagccgtcttttctggtgtaatattctagtttggtagtagatacatatcaatatcatcaaattcgagatccgaattataaaatgggcgtggattgttaactatagaatcggacgtctgatattcgaaaatctgtggagtttcaggttttggtggaggtgtaactgctacttgggatactgaagtctgatattcagaaagctgtggatgttctggttcggcatccaccgatggtgtcacatcactaatcggttcggtaacgtctgtggatggaggtgctacttctacagaacctgtagcctcagttgtcaacggagatacatttttaatgcgagaaaatgtataatttggtaatggtttcttatgtggatctgaagaagaggtaagatatctactagaaagataccgatcacgttctagttctcttttgtagaacttaactttttctttctccgcatctagttgatattccaacctcttcacgttactacgttcagattccaattcacgttcgcatgggttacctccgcagtttttacgagcgatttcacgttcagccttcatgcgtctctccctctctctatcgagtttatcagagcagtctttctgaaggcgatcgaactccataaatttctccaacgctttgattgtttccatagatttccgaagttcagcttttaggactgtgattctttttctttcgaattcacagctggatgtacaaccgtttccattaccgccatctctaagtttcttttctagatcggcaacatttcatccccatgccttttacattcctcgagtctactgtcgtcgaaatatcgttccagctccttttcgacatcaataactttagcacgttgtctctcaagctctcttttgtagttatctgattccctggcacgtttaagatcttcatgcaattgagtcagctcttaacttcctctcttgcttcttcgtcatagtacgcgcaatcactgtgagatccattgttaccacgtctacactcggcgagctcgcgtttaagagattcaatttcccgtttgtattggtccatgtttccattgctaccaccattagatttacaggctgctagttgtcgttcgagatcagaaatacgggttttcttggaattgatttcgtcgatgtacttggcatcgaaacacttattaagttctttttccaattctacgattttatttctttcgcgagtcaattccctcctgtagtaactatctgttttgtcagattcacgctctctacgtagactttcttgcaagttactaatttgttccctagcacgtccgagtttagttttatatgctgaatagagttctgattcatcctttgagcagatctctagcgatcgtttaagattcctaattctagtctttagcctatttacctcctcagaagatgttccgttaccgttgcgtttacactcgttaagctgtctatcaagatccatgattctatctctaagacgttgcatctctctttccatatcagcattgctttcattattacgtctgcagtcactcaactgtctttcaatatctgagattctatctctaagacgtcgcatctctctctgtttcggcattggtttcattattacgtttacagtcgttcaactgtctttcaagatctgatattctagattggagtctgctaatctctgtagcattttcacggcattcactcagttgtctttcaagatctgaaattttagattggagtctgctaatctctgtaagatttcctcctccgctctcgatgcagtcggtcaacttattctctagttctctaatacgcgaacgcagtgcatcaacttcttgcgtgtcttcctggttgcgtgtacattcatcgagtctagattcgagatctctaacgcgtcgtcgttcttcctcaagttctctgcgtactacagaaagcgtgtccttatcttgttgatatttagcaatttctgattctagagtactgattttgcttacgtagttactaatatttgtcttggccttatcaagatcctccttgtatttgtcgcattccttgatatccctacgaagtctggacagttcccattcgacattacgacgtttatcgatttcagctcggagatcgtcatcgcgttgttttagccacatacgactgagttcaagttctcgttgacaagatccatctacttttccattcctaatagtatccagttccttttctagttctgaacgcatttctcgttccctatcaagcgattctctcaattctcggatagtcttcttatcaatttctaataaatctgaaccatcatctgtcccattttgaatatccctgtgttctttgatctcttttgtaagtcggtcgattctttcggttttataaacagaatccctttccaaagtcctaatcttactgagtttatcactaagttctgcattcaattcggtgagttttctcttggcttcttccaactctgttttaaactctccactatttccgcattcttcctcgcatttatctaaccattcaattagtttattaataactagttggtaatcagcgattcctatagccgttcttgtaattgtgggaacataattaggatcttctaatggattgtatggcttgatagcatcatctttatcattattagggggatggacaaccttaattggttggtcctcatctcctccagtagcgtgtggttcttcaataccagtgttagtaataggcttaggcaaatgcttgtcgtacgcgggcacttcctcatccatcaagtatttataatcgggttctacttcagaatattcttttctaagagacgcgacttcgggagttagtagaagaactctgtttctgtatctatcaacgctggaatcaatactcaagttaaggatagcgaatacctcatcgtcatcatccgtatcttctgaaacaccatcatatgacatttcatgaagtctaacgtattgataaatagaatcagatttagtattaaacagatccttaacctttttagtaaacgcatatgtatattttagatctccagatttcataatatgatcacatgccttaaatgtcagtgcttccatgatataatctggaacactaatgggtgacgaaaaagatacagcaccatatgctacgttgataaataaatctgaaccactaagtagataatgattaatgttaagaaagaggaaatattcagtgtataggtatgtcttggcgtcatatcttgtactaaacacgctaaacagtttgttaatgtgatcaatttccaatagattaattagagcagcgggaataccaacaaacatattaccacatccgtattttctatgaatatcacatatcatgttaaaaaatcttgatagaagagcgaatatctcgtctgacttaatgagtcgtagttcagcagcaacataagtcataactgtaaatagaacatactttcctgtagtgttgattctagactccacatcaacaccattattaaaaatagttttatatacatctttaatctgctctccgttaatcgtcgaacgttctagtatacggaaacactttgatttcttatctgtagttaatgacttagtgatatcacgaagaatattacgaattacatttcttgtttttcttgagagacctgattcagaactcaactcatcgttccatagtttttctacctcagtggcgaaatctttggagtgcttggtacatttttcaataaggttcgtgacctccatttattataaaaaatttattcaaaacttaactacaatcgggtaattataaaatcgtagatctcccatgtggcggaatactaccatctatcgcatgtggatggacagtaggtaatggccatgggaacagtaatgtttgcatatttatctttcttgccagtattactgcatattgtcccaatgtttcgatgtgatgttctaacctatcaactgccgctgtatcacaacaatagtgtccgatgaaattaagattatgatccaatgtgtttaatatatgattatcaagtcttatacgatccgcgtcttttttgacaggatcaggttcttctacaggaagaagtttcggcctcttatgatattcatgtctgggaaacggtggtctagggtgaggctccggtatcggagtgggttttggattataatcatcatcgtctatgacatcatcatcatcttcgacttcgatatttattttgctatcttgatgatgtcctgtatcagttgcattttcagcactcgactgaatattagcgcattcattgtctattattaccatatttctaaacccaaaatgtatgtgttgaacatcagtactatcgttgatgagtcttatagcatgaattcgcttatcgttatcgggtttatcttctgtcaccttagcaattccttttttattaaactctacataatcatatccatttctattgtttgttctaatataaacgagtatagcatcattgctaaatttttcaatagtatcaaaaacagaatatcctaaaccatataatatatattcaggaacactcaaactaaatgtccaggattctcctaaatacgtaaactttaatagtgcgaaatcattcaaaaatctaccacttatagatagatagtacataaatgcgtatagtagtctacctatctctttattatgaaaaccggcattacgatcatatatgtcgtgatatacctgtgatccgtttacgttaaaccataaatacatgggtgatcctataaacatgaatttatttctaattctcagagctatagttaattgaccgtgtaatatttgcttacatgcatacttgatacgcttattaataagatttttatcattgctcgttatttcagaatcgtatatataaggagtaccatcgtgattcttaccagatattatacaaaatactatatataaaatatattgacccacgttagtaatcatataaatgtttaacgttttaaattttgtattcaatgatccattatcatacgctatcatggtcttgtaatattcattctttaaaatataatattgtgttagccattgcattggagctcctaatggagattttctattctcatccattttaggataggctttcataaagtccctaataacttcgtgaataatgtttctatgttttctactgatgcatgtatttgcttcgatttttttatcccatgtttcatctatcatagatttaaacgcagtaatgctcgcaacattaacatcttgaaccgttggtacaattccgttccataaatttataatgttcgccatttatataactcattttttgaatatacttttaattaacaaaagagttaagttactcatatggacgccgtccagtctgaacatcaatctttttagccagagatatcatagccgctcttagagtttcagcgtgattttccaacctaaatagaacttcatcgttgcgtttacaacacttttctatttgttcaaactttgttgttacattagtaatctttttttccaaattagttagccgttgtttgagagtttcctcattgtcgtcttcatcggctttaacaattgcttcgcgtttagcctctggctttttagcagcctttgtagaaaaaaattcagttgctggaattgcaagatcgtcatctccggggaaaagagttccgtccatttaaagtacagattttagaaactgacactctgcgttatttatatttggtacaacacatggattataaatattgatgttaataacatcagaaaatgtaaagtctatacattgttgcatcgtgttaaattttctaatggatctagtattattgggtccaacttctgcctgaaatccaaatatggaagcggatacaaaaccgtttcctggataaaccacacatctccacttttgctttacatcagaaattgtgtcgttgacatcttgaactctcctatctaatgccggtgttccacctatagattttgaatattcgaatgctgcatgagtagcattaaattccttaatattgccataattttcatatattgagtaaccctggataaaaagtaaacacaccgcagccgtcgctaccacaataaaaaaaattgatagagagttcatttataatctattagaagctgacaaaatttttttacacgcatcagacaatgctttaataaatagttcaacatctacttttgtcatatcgaaccgatggtatgattctaacctagaattacatccgaaaaagttgactatgttcatagtcattaagtcattaacaaacaacattccagactctggattataagacgatactgtttcgtcacaattacctaccttaatcatgtgattatgaatattggctattagagcaccttctaagaaatctataatatctttgaaacacgatttaaaatcaaaccacgaatatacttctacgaagaaagttagtttacccataggagaaataactataaatggagatctaaatacaaaatccggatctatgatagttttaacattattatattctctattaaatacctccacatctaaaaatgttaattttgaaactatgtcttcgtttattaccgtacctgaactaaacgctataagctctattgtttgagaactctttaaacgatattcttgaaatacatgtaacaaagtttcctttaactcggtcggtttatctaccatagttacagaatttgtatccttatctataatataataatcaaaatcgtataaagttatataattatcgcgttcagattgggatcttttcaaatagactaaaaaccccatttctctagtaagtatcttatgtatatgtttgtaaaatatcttcatggtgggaatatgctctaccgcagttagccattcctcattgacagcggtagatgtattagacaaaactattccaatgtttaacaagggccattttacgagattattaaatccttgtttgataaatgtagccaatgagggttcgagttcaacgacgattgaattctcttcccgcggatgctgcatgatgaacgacgggatgttgttcgattgatttggaattctttttcgactttttgtttatattaaatattttaaaatttatagcggatagcaattcatgtaccacggataatgtagacgcgtattgcgcatcgatatctttattattagataaatttatcaataaatgtgagaagtttgcctcgttaaggtcttccatttaaatattatataaacatttgtgtttgtatcttattcgtcttttatggaatagttttttactagtaaagctgcaattacacactttgtccgtaaaacataaatataaacaccagcttttatcaatcgttccaaaaagtcgacggcggacatttttaacatggcatctattttaaatacacttaggtttttggaaaaaacatcattttataattgtaacgattcaataactaaagaaaagattaagattaaacataagggaatgtcatttgtattttataagccaaagcattctaccgttgttaaatacttgtctggaggaggtatatatcatgatgatttggttgtattggggaaggtaacaattaataatctaaagatgatgctattttacatggatttatcatatcatggagtgacaagtagtggagcaatttacaaattgggatcgtctatcgatagactttctctaaataggactattgttacaaaagttaataattatgatgatacattttttgacgacgatgattgatcgctattgcacaattttgtttttgtactttctaatatagtgtttaggttctttttcatatgagaatattgatttactaaaatatctatgtttaacttttgttctatgacgtccttatcggcggtatcggtacatatacgtaattcaccttcacaaaatacggagtcttcgataataatagccaatcgattattggatctagctgtctgtatcatattcaacatgtttaatatatcctttcgtttcccctttacaggcatcgatcgtagcatattttccgcgtctgatatggaaatgttaaaactacaaaaatgcgtaatgttagcccgtcctaatattggtacgtgtctataagtttggcatagtagaataatagacgtgtttaaatgccttccaaagtttaagaattctattagagtattgcattttgatagtttatcgcctacatcatcaaaaataagtaaaaagtgtgctgattttttatgattttgtgcgacagcaatacatttttctatgttacttttagttcgtatcagattatattctagagattcctgactactaacgaaattaatatgatttggccaaatgtatccatcataatctgggttataaacgggtgtaaacaagaatatatgtttatattttttaactagtgtagaaaacagagatagtaaatagatagtttttccagatccagatcctcctgttaaaaccattctaaacggcatttttaataaattttctcttgaaaattgtttttcttggaaacaattcataattatatttacagttactaaattaatttgataataaatcaaaatatggaaaactaaggttgttagtagggaggagaacaaagaaggcacatcgtgatataaataacatttattatcatgatgacaccagaaaacgacgaagagcagacatctgtgttctccgctactgtttacggagacaaaattcagggaaagaataaacgcaaacgcgtgattggtctatgtattagaatatctatggttatttcactactatctatgattaccatgtccgcgtttctcatagtgcgcctaaatcaatgcatgtctgctaacgaggctgctattactgacgccgctgttgccgttgctgctgcatcatctactcatagaaaggttgcgtctagcactacacaatatgatcacaaagaaagctgtaatggtttatattaccagggttcttgttatatattacattcagactaccagttattctcggatgctaaagcaaattgcactgcggaatcatcaacactacccaataaatccgatgtcttgactacctggctcattgattatgttgaggatacatggggatctgatggtaatccaattacaaaaactacatccgattatcaagattctgatgtatcacaagaagttagaaagtatttttgtgttaaaacaatgaactaatatttatttttgtacattaataaatgaaatcgcttaatagacaaactgtaagtaggtttaagaagttgtcggtgccggccgctataatgatgatactctcaaccattattagtggcataggaacatttctgcattacaaagaagaactgatgcctagtgcttgcgccaatggatggatacaatacgataaacattgttatttagatactaacattaaaatgtctacagataatgcggtttatcagtgtcgtaaattacgagctagattgcctagacctgatactagacatctgagagtattgtttagtattttttataaagattattgggtaagtttaaaaaagaccaatgataaatggttagatattaataatgataaagatatagatattagtaaattaacaaattttaaacaactaaacagtacgacggatgctgaagcgtgttatatatacaagtctggaaaactggttaaaacagtatgtaaaagtactcaatctgtactatgtgttaaaaaattctacaagtgacaacaaaaaatgaattaataataagtcgttaacgtacgccgccatggacgccgcgtttgttattactccaatgggtgtgttgactataacagatacattgtatgatgatctcgatatctcaatcatggactttataggaccatacattataggtaacataaaaactgtccaaatagatgtacgggatataaaatattccgacatgcaaaaatgctactttagctataagggtaaaatagttcctcaggattctaatgatttggctagattcaacatttatagcatttgtgccgcatacagatcaaaaaataccatcatcatagcatgcgactatgatatcatgttagatatagaagataaacatcagccattttatctattcccatctattgatgtttttaacgctacaatcatagaagcgtataacctgtatacagctggagattatcatctaatcatcaatccttcagataatctgaaaatgaaattgtcgtttaattcttcattctgcatatcagacggcaatggatggatcataattgatgggaaatgcaatagtaattttttatcataaaagttgtaaagtaaataataaaacaataaatattgaactagtagtacgtatattgagcaatcagaaatgatgctggtacctcttatcacggtgaccgtagttgcgggaacaatattagtatgttatatattatatatttgtaggaaaaagatacgtactgtctataatgacaataaaattatcatgacaaaattaaaaaagataaagagttctaattccagcaaatctagtaaatcaactgatagcgaatcagactgggaggatcactgtagtgctatggaacaaaacaatgacgtagataatatttctaggaatgagatattggacgatgatagcttcgctggtagtttaatatgggataacgaatccaatgttatggcgcctagcacagaacacatttacgatagtgttgctggaagcacgctgctaataaataatgatcgtaatgaacagactatttatcagaacactacagtagtaattaatgaaacggagactgttgaagtacttaatgaagataccaaacagaatcctaactattcatccaatcctttcgtaaattataataaaaccagtatttgtagcaagtcaaatccgtttattacagaacttaacaataaatttagtgagaataatccgtttagacgagcacatagcgatgattatcttaataagcaagaacaagatcatgaacacgatgatatagaatcatcggtcgtatcattggtgtgattagtttcctttttataaaattgaagtaatatttagtattattgctgccgtcacgttgtacaaatggagatattccctgtattcggcatttctaaaattagcaattttattgctaataatgactgtagatattatatagatacagaacatcaaaaaattatatctgatgagatcaatagacagatggatgaaacggtacttcttaccaacatcttaagcgtagaagttgtaaatgacaatgagatgtaccatcttattcctcatagattatcgacgattatactctgtattagttctgtcggaggatgtgttatctctatagataatgacatcaatggcaaaaatattctaacctttcccattgatcatgctgtaatcatatccccactgagtaaatgtgtcgtagttagcaagggtcctacaaccatattggttgttaaagcggatatacctagcaaacgattggtaacatcgtttacaaacgacatactatatgtaaacaatctgtcactgattaattatttgccgttgtctgtattcattattagacgagtcaccgactatttggatagacacatatgcgatcagatatttgctaataataagtggtattcccttataaccatcgacgataagcaatatcctattccatcaaactgtataggtatgtcctctgccaagtacataaattctagcatcgagcaagatactttaatccatgtttgtaacctcgagcatccgttcgactcagtatacaaaaaaatgcagtcgtacaattctctacctatcaaggaacaaatattgtacggtagaattgataatataaatatgagcattagtatttctgtggattaatagatttctagtatggggatcattaatcatctctaatctctaaatacctcataaaacgaaaaaaaagctattatcaaatactgtacggaatggattcattctcttctctttttatgaaactctgttgtatatctactgataaaactggaagcaaaaaatctgatagaaagaataagaataagatcaaggattatatggaacacgattattataaaataacaatagttcctggttcctcttccacgtctactagctcgtggtattatacacatgcctagtaatagtctctttgcgttgacggaaagcagactagaaataacaggctaaaatgttcagacaccataatagttcccaacccagataataacagagttccatcaacacattcctttaaactcaatcccaaacccaaaaccgttaaaatgtatccggccaattgatagtagataatgaggtgtacagcgcatgataatttacacagtaaccaaaatgaaaatactttagtaattataagaaatatagacggtaatgtcatcatcaacaatccgataatatgcctgagagtaaacattgacggataaaacaaaaatgctccgcataactctatcatggcaataacacaaccaaatacttgtaagattcctaaattagtagaaaatacaacgaatatcgatgtataagtgatctcgagaaataataagaataaagtaatgcccgtaaagataaacatcaacattgtttggtaatcattaaaccaattagtatgaagttgaactaatttcacagtagattttattccagtgttatcctcgcatgtataagtacctggtaagatatctttatattccataatcaatgagacatcactatctgataacgaatgaagtctagcactagtatgccatttacttaatattgtcgtcttggaagttttattataagttaaaatatcatggttatccaatttccatctaatatactttgtcggattatctatagtacacggaataatgatggtatcattacatgctgtatactctatggtctttgtagttgttataacaaccaacgtatagaggtatatcaacgatattctaactcttgacattttttatttatttaaaatgatacctttgttatttattttattctattttgctaacggtattgaatggcataagtttgaaacgagtgaagaaataatttctacttacttattagacgacgtattatacacgggtgttaatggggcggtatacacattttcaaataataaactaaacaaaactggtttaactaataataattatataacaacatctataaaagtagaggatgcggataaggatacattagtatgcggaaccaataacggaaatcccaaatgttggaaaatagacggttcagacgacccaaaacatagaggtagaggatacgctccttatcaaaatagcaaagtaacgataatcagtcacaacggatgtgtactatctgacataaacatatcaaaagaaggaattaaacgatggagaagatttgacggaccatgtggttatgatttatacacggcggataacgtaattccaaaagatggtttacgaggagcattcgtcgataaagatggtacttatgacaaagtttacattcttttcactgatactatcggctcaaagagaattgtcaaaattccgtatatagcacaaatgtgcctaaacgacgaaggtggtccatcatcattgtctagtcatagatggtcgacgtttctcaaagtcgaattagaatgtgatatcgacggaagaagttatagacaaattattcattctagaactataaaaacagataatgatacgatactatatgtattcttcgatagtccttattccaagtccgcattatgtacctattctatgaataccattaaacaatctttttctacgtcaaaattggaaggatatacaaagcaattgccgtctccagctcctggtatatgtttaccagctggaaaagttgttccacataccacgtttgaagtcatagaaaaatataatgtactagatgatattataaagcctttatctaaccaacctatcttcgaaggaccgtctggtgttaaatggttcgatataaaggagaaggaaaatgaacatcgggaatatagaatatacttcataaaagaaaattctatatattcgttcgatacaaaatctaaacaaactcgtagctcgcaagtcgatgcgcgactattttcagtaatggtaacttcgaaaccgttatttatagcagatatagggataggagtaggaatgccacaaatgaaaaaaatacttaaaatgtaatcttaattcgagtacaccacacgacaatgaacaaacataagacagattatgctggttatgcttgctgcgtaatatgcggtctaattgtcggaattatttttacagcgacactattaaaagttgtagaacgtaaattagttcatacaccatcaatagataaaacgataaaagatgcatatattagagaagattgtcctactgactggataagctataataataaatgtatccatttatctactgatcgaaaaacctgggaggaaggacgtaatgcatgcaaagctctaaattcaaattcggatctaattaagatagagactccaaacgagttaagttttttaagaagccttagacgaggctattgggtaggagaatccgaaatattaaaccagacaaccccatataattttatagctaagaatgccacgaagaatggaactaaaaaacggaaatatatttgtagcacaacgaatactcccaaactgcattcgtgttacactatataacaattacactacatttttatcataccactacttcggttagatgttttagaaaaaaataaatatcgccgtaccgttcttgtttttataaaaataacaattaacaattatcaaattttttctttaatattttacgtggttgaccattcttggtggtaaaataatctcttagtgttggaatggaatgctgtttaatgtttccacactcatcgtatattttgacgtatgtagtcacatcgtttacgcaatagtcagactgtagttctatcatgcttcctacatcagaaggaggaacagttttaaagtctcttggttttaatctattaccgttagttttcatgaaatcctttgttttatccacttcacattttaaataaatgtccactatacattcttttgttaattttactagatcgtcatgggtcatagaatttataggttccgtagtccatggatccaaactagcaaacttcgcgtatacggtatcgcgattagtgtatacaccaactgtatgaaaattaagaaaacagtttaataaatcaacagaaatatttaatcctccgtttgatacagatgcgccatatttatggatttcggattcacacgttgtttgtctgaggtgttcgtctagtgttgcttctacgtaaacttcgattcccatatattctttattgtcagaatcgcataccgatttatcatcatacactgtttgaaaactaaatggtatacacatcaaaataataaataataacgagtacattctgcaatattgttatcgtaattggaaaaatagtgttcgagtgagttggattatgtgagtattggattgtatattttattttatattttgtaataagaataaaatgctaatgtcaagtttattccaatagatgtcttattaaaaacatatataataaataacaatggctgaatggcataaaattatcgaggatatctcaaaaaataataagttcgaggatgccgccatcgttgattacaagactacaaagaatgttctagctgctattcctaacagaacatttgccaagattaatccgggtgaaattattcctctcatcactaatcgtaatattctaaaacctcttattggtcagaaatattgtattgtatatactaactctctaatggatgagaacacgtatgctatggagttgcttactgggtacgcccctgtatctccgatcgttatagcgagaactcataccgcacttatatttttgatgggtaagccaacaacatccagacgtgacgtgtatagaacgtgtagagatcacgctacccgtgtacgtgcaactggtaattaaaataaaaagtaatattcatatgtagtgtcaattttaaatgatgatgatgaaatggataatatccatattgacgatgtcaataatgccggtattggcatacagttcatcgatttttagatttcattcagaggatgtggaattatgttatgggcatttgtattttgataggatctataatgtagtaaatataaaatataatccgcatattccatatagatataattttattaatcgcacgttaaccgtagatgaactagacgataatgtcttttttacacatggttattttttaaaacacaaatatggttcacttaatcctagtttgattgtctcattatcaggaaacttaaaatataatgatatacaatgctcagtaaatgtatcgtgtctcattaaaaatttggcaacgagtacatctactatattaacatctaaacataagacttattctctacatcggtccacgtgtattactataataggatacgattctattatatggtataaagatataaatgacaagtataatgacatctatgattttactgcaatatgtatgctaatagcgtctacattgatagtgaccatatacgtgtttaaaaaaataaaaatgaactcttaattatgctatgctattagaaatggataaaatcaaaattacggttgattcaaaaattggtaatgttgttaccatatcgtataacttggaaaagataactattgatgtcacacctaaaaagaaaaaagaaaaggatgtattattagcgcaatcagttgctgtcgaagaggcaaaagatgtcaaggtagaagaaaaaaatattatcgatattgaagatgacgatgatatggatgtagaaagcgcgtaatactatctataaaaataagtatataataaatactttttatttacggtactcttactgtgtagtggtgataccctactcgattatttttttaaaaaaatacttattctgattcttctaaccatttccgtgttcgttcgaatgccacatcgacgtcaaagataggggagtagttgaaatctagttctgcattgttggtacgcacctcaaatgtagtgttggatatcttcaacgtatagttgttgagtagtgatggttttctaaatagaattctcttcatatcattcttgcacgcgtacatttttagcatccatcttggaatcctagatccttgttctattcccaatggtttcatcaatagaagattaaacatatcgtacgaacacgatggagagtaatcgtagcaaaagtaagcatttcctttaatcttagatcccggatactggatatattttgcagccaacacgtgcatccatgcagcatttcctacatatacccggctatgcaccgcgtcatcatcgactgtacgatacataatgttaccgtgttgcttacattgctcgtaaaagactttcgtcaatttgtctccttctccgtaaattctagtgggtcttaggcaacaagtatacaattttgctccattcatgattacggaattattggctttcataaccagttgctcggccatacgtttactttttgcgtatacatgtcctggtgatatatcataaagggtatgctcatggccgatgaatggatcaccgtgtttattgggtcctattgcttccatgctactagtatagatcaaatacttgattcctaggtccacacaagctgccaaaatagtctgtgttccataatagtttactttcatgatttcattatcggtgtattttccaaatacatccactagagcagccgtatgaataatcagatttaccccatctagcgcttctctcaccttatcaaagtcgtttatatcacattgtatatagtttataaccttaactttcgaggttattggttgtggatcttctacaatatctatgactctgatttcttgaacatcatctgcactaattaacagttttactatatacctgcctagaaatccggcaccaccagtaaccgcgtacacggccattgctgccactcataatatcagactacttattctattttactaaataatggctgtttgtataatagaccacgataatatcagaggagttatttactttgaaccagtccatggaaaagataaagttttaggatcagttattggattaaaatccggaacgtatagtttgataattcatcgttacggagatattagtcaaggatgtgattccataggcagtccagaaatatttatcggtaacatctttgtaaacagatatggtgtagcatatgtttatttagatacagatgtaaatatatttacaattattggaaaggcgttatctatttcaaaaaatgatcagagattagcgtgtggagttattggtatttcttacataaatgaaaagataatacattttcttacaattaacgagaatggcgtttgatatatcagttaatgcgtctaaaacaataaatgcattagtttacttttctactcagcaaaataaattagtcatacgtaatgaagttaatgatacacactacactgtcgaatttgatagggacaaagtagttgacacgtttatttcatataatagacataatgacaccatagagataagaggggtgcttccagaggaaactaatattggttgcgcggttagtatgacttacttgtataataagtatagttttaaactgattttagcagaatatataagacacagaaatactatatccggcaatatttattcggcattgatgacactagatgatttggctattaaacagtatggagacattgatctattatttaatgagaaacttaaagtagactccgattcgggactatttgactttgtcaactttgtaaaggatatgatatgttgtgattctagaatagtagtagctctatctagtctagtatctaaacattgggaattgacaaataaaaaatataggtgtatggcattagccgaacatatatctgatagtattccaatatctgagctatctagactacgatacaatctatgtaagtatctacgcggacacactgagagcatagaggataaatttgattattttgaagacgatgattcgtctacatgttctgccgtaaccgacagggaaacggatgtataattttttttatagcgtgaaggatatgataaaaaatataattgttgtatttatcccattccaatcaccttatatgattctgtaacacaataaaggagtcttatagatgtatagaggtcagatactggtttgataaactgtttattccacataagtatgtttgactttatggttagacccgcatactttaacaaatcactgaaaattggagttaggtattgacctctcagaatcagttgccgttctggaacattaaatgtattttttatgatatactccaacgcatttatgtgggcatacaacaagtcattactaatggaatattccaagagttttagttgtctagtatttaacaagagaagagatttcaacagactgtttatgaactcgaatgccgcctcattgtcgcttatattgatgatgtcgaattctcccaatatcatcaccgatgagtagctcatcttgttatcgggatccaagttttctaaagatgtcattaaaccctcgatcatgaatggatttatcatcatcgtttttatgttggacatgagcttagtccgtttgtccacatctatagacgacgatttctgaattatttcatatatccctctctttaactccaggaacttgtcaggatggtctactttaatatgttctcgtctaagagatgaaaatctttggatggttgcacgcgacttttctctaaaggatgacgttgcccaagatcctctcttaaatgaatccatcttatccttggacaagatggacagtctattttccttagatggtttaatatttttgttacccatgatctataaaggtagacctaatcgtctcggatgacctatatatttattttcagttttattatacgcataaattgtaaaaaatatgttaggtttacaaaaatgtctcgtggggcattaatcgtttttgaaggattggacaaatctggaaaaacaacacaatgtatgaacatcatggaatcaataccggcaaacacgataaaatatcttaactttcctcagagatccactgtcactggaaagatgatagatgactatctaactcgtaaaaaaacctataatgatcatatagttaatctattattttgtgcaaatagatgggagtttgcatcttttatacaagaacaactagaacagggaattactttaatagttgatagatacgcgttctctggagtagcgtatgccgccgctaaaggcgcgtcaatgactctcagtaagagttatgaatctggattgcctaaacccgacttagttatattcttggaatctggtagcaaagaaattaatagaaacgtcggtgaggaaatttatgaagatgttacattccaacaaaaggtattacaagaatataaaaaaatgattgaagaaggagatattcattggcaaattatttcttctgaattcgaggaagatgtaaagaaggagttgattaagaatatagttatagaggctatacacacggttactggaccagtggggcaactgtggatgtaatagtgaaattacattttttataaatagatgttagtacagtgttataaatggatgaagcatattactctggcaacttggaatcagtactcggatacgtgtccgatatgcataccgaactcgtatcaatatctcaattagttattgccaagatagaaactatagataatgatatattaaacaaggacattgtaaattttatcatgtgtagatcaaacttggataatccatttatctctttcctagatactgtatatactattatagatcaagagaactatcagaccgagttgattaattcattagacgacaatgaaattatcgattgtatagttaataagtttatgagcttttataaggataacctagaaaatatagtagatgctatcatcactctaaaatatataatgaataatccagattttaaaactacgtatgccgaagtactcggttccagaatagccgatatagatattaaacaagtgatacgtaagaatatactacaattgtctaatgatatccgcgaacgatatttgtgaaaatattaaaaaaaaatactttttttattaaatgacgtcgcttcgcgaatttagaaaattatgctgtgatatatatcacgcatcaggatataaagaaaaatctaaattaattagagactttataacagatagggatgataaatatttgatcattaagctattgcttcccggattagacgatagaatttataacatgaacgataaacaaattataaaattatatagtataatatttaaacaatctcaggaagatatgctacaagatttaggatacggatatataggagacactattaggactttcttcaaagagaacacagaaatccgtccacgagataaaagcattttaactttagaagacgtggatagtttcttaactacgttatcatccgtaactaaagaatcgcatcaaataaaattattgactgatattgcatccgtttgtacatgtaatgatttaaaatgtgtagtcatgcttattgataaagatctaaaaattaaagcgggtcctcggtacgtacttaacgctattagtcctcatgcctatgatgtgtttagaaaatctaataacttgaaagagataatagaaaattcatctaaacaaaatctagactctatatctatttctgttatgactccaattaatcccatgttagcggaatcgtgtgattctgtcaataaggcgtttaaaaaatttccatcaggaatgtttgcggaagtcaaatacgatggtgaaagagtacaagttcataaaaataataacgagtttgccttctttagtagaaacatgaaaccagtactctctcataaagtggattatctcaaagaatacataccgaaagcatttaaaaaagctacgtctatcgtattggattctgaaattgttcttgtagacgaacataatgtaccgctcccgtttggaagtttaggtatacacaaaaagaaagaatataaaaactctaacatgtgtttgttcgtgtttgactgtttgtactttgatggattcgatatgacggacattccattgtacgaacgaagatcttttctcaaagatgttatggttgaaatacccaatagaatagtattctcagagttgacgaatattagtaacgagtctcagttaactgacgtattggatgatgcactaacgagaaaattagaaggattggtcttaaaagatattaatggagtatacgaaccgggaaagagaagatggttaaaaataaagcgagactatttgaacgagggttccatggcagattctgccgatttagtagtactaggtgcctactatggtaaaggagcaaagggtggtatcatggcagtctttctaatgggttgttacgacgatgaatccagtaaatggaagacggttaccaagtgttcaggacacgatgataatacgttaagggagttgcaagaccaattaaagatgattaaaattaacaaggatcccaaaaaaattccagagtggttagtagttaataaaatctatattcccgattttgtagtagaggatccgaaacaatctcagatatgggaaatttcaggagcagagtttacatcttccaagtcccataccgcaaatggaatatccattagatttcctagatttactaggataagagaggataaaacgtggaaagaatctactcatctaaacgatttagtaaacttgactaaatcttaatagttacatacaaactgaaaattaaaataacactatttagttggtggtcgccatggatggtgttattgtatactgtctaaacgcgctagtaaaacatggcgaggaaataaatcatataaaaaatgatttcatgattaaaccatgttgtgaaagagtttgtgaaaaagtcaagaacgttcacattggcggacaatctaaaaacaatacagtgattgcagatttgccatatatggataatgcggtatccgatgtatgcaattcactgtataaaaagaatgtatcaagaatatccagatttgctaatttgataaagatagatgacgatgacaagactcctactggtgtatataattattttaaacctaaagatgccattcctgttatcatatctataggaaaggataaagatgtctgtgaactattaatctcatcagacatatcgtgtgcatgcgtggagttaaattcatatcacgtagccattcttcccatggatgtttccttttttaccaaaggaaatgcatcattgattattctcctgtttgatttctctatcgatgcggcacctctcttaagaagtgtaaccgataataatgttattatatctagacaccagcgtctacatgacgagcttccgagttccaattggttcaagttttacataagtataaagtccgactattgttctatattatatatggttgttgatggatctgtgatgcatgcgatagctgataatagaactcacgcaattattagcaaaaatatattagacaatactacgattaacgatgagtgtagatgctgttattttgaaccacagattaggattcttgatagagatgagatgctcaatggatcatcgtgtgatatgaacagacattgtattatgatgaatttacctgatgtaggcgaatttggatctagtatgttggggaaatatgaacctgacatgattaagattgctctttcggtggctggtaatttaataagaaatcgagactacattcccgggagacgaggatatagctactacgtttacggtatagcctctagataatttttttaagcacgaaataaaaaacataattttaaaccaatctatttcatactattttgtgtgatcaccatggacataaagatagatattagtatttctggtgataaatttacggtgactactaggagggaaaatgaagaaagaaaaaaatatctacctctccaaaaagaaaaaactactgatgttatcaaacctgattatcttgagtacgatgacttgttagatagagatgagatgtttactattctagaggaatattttatgtacagaggtctattaggcctcagaataaaatatggacgactctttaacgaaattaaaaaattcgacaatgatgcggaagaacaattcggtactatagaagaactcaagcagaaacttagattaaattctgaagagggagcagataactttatagattatataaaggtacaaaaacaggatatcgtcaaacttactgtatacgattgcatatctatgataggattgtgtgcatgcgtggtagatgtttggagaaatgagaaactgttttctagatggaaatattgtttacgagcgattaaactgtttattaatgatcacatgcttgataagataaaatctatactgcagaatagactagtatatgtggaaatgtcatagaaagttaaaagttaatgagagcaaaaatatataaggttgtattccatatttgttattttttctgtaatagttaaaaaatacattcgatggtctatctatcagattattatgtgttataaggtactttttctcataataaactagagtatgagtaagatagtgtttttcaaaacatataaatctaaaattgatggatgagatatacagctattaatttcgaaaatatattttaatctgataactttaaacatggatttttgatggtggtttaacgttttaaaaaaagattttgttattgtagtatatgataatattaaaagatggatataaagaatttgctgactgcatgtactattttttacattactacattggctacggcagatatacctacttcgtcactgccacacgctccggtaaacggggcatgtgacgagggagaatatcttgataagaggcataatcaatgttgtaatcagtgtccacctggagaatttgccaaggtcagatgtaatggtaacgataacacaaaatgtgaacgctgcccacctcatacatataccgcaatccccaattactctaatggatgtcatcaatgtagaaaatgcccaacaggatcatttgataaggtaaagtgtaccggaacacagaacagtaaatgttcgtgtcttcctggttggtattgcgctactgattcttcacagactgaagattgtcgagattgtataccaaaaaggagatgtccatgcggatactttggtggaatagatgaacaaggaaatcctatttgtaaatcgtgttgtgttggtgaatattgcgactacctacgtaattatagacttgatccatttcctccatgcaaactatctaaatgtaattaattatgattttgatgataatgttaccatacattatatcgctacttggttagtgtattattcagtatgaagacctattaataattacttatcttttgacgatcttgttataattataatataaaaacttatggcatagtaacttataattgctgacgcgataaattcgtaataatctgttttgttcaaaggaatctacaggcataaaaataaaaatataatttataatatactcttacagcgcgccatcatgaataacagcagtgaattgattgctgttattaatggatttagaaatagtggacgattttgtgatattagtatagttattaatgatgaaatgataaacgctcacagactcatcctatctggagcctccgaatatttttccattctgttttccaataattttatcgattctaatgaatacgaagttaatctaagtcatttagattatcaaagcgtaaacgatttgatcgattacatttatgggatacctttgagcctaactaacgataacgtgaaatatattctttcaaccgctgattttttacaaattggatctgccattactgagtgcgaaaaatacatacttaaaaatctttgttctagaaactgtatcgatttctacatatacgctgataaatataataacaagaaaatagaatcagcgtcgtttaacacaatattacaaaatattttgagactcatcaacgatgaaaactttaaatacttaacagaggaatcaatgataaaaattttaagcgatgatatgttaaatataaaaaatgaggatttcgccccactaattctcattaaatggttagagagtactcaacaaccatgcaccgtcgagttacttaaatgcctcagaatatcattgctttccccacaagttataaaatcactttatagtcatcgactggttagttcaatctacgaatgtataacattcttaaacaatatagcattcttggatgaatcatttcctagataccatagcatcgagttgatatctatcggtataagtaattcgcatgataagatttccataaactgctacaatcataaaaaaaatacatgggaaatgatatcttcacgtagatataggtgtagtttcgcagtggccgtcctggataatattatttatatgatgggtggatatgatcagtccccgtatagaagttcaaaggttatagcgtacaatacatgtacaaattcttggatatatgatataccagagctaaaatatcctcgttctaattgtgggggactggctgatgacgaatacatttattgtataggcggcatacgcgatcaggattcatcgttgacatctagtattgatagatggaagccatcaaaaccatattggcagaagtatgctaaaatgcgcgaaccaaaatgtgatatgggggttgcgatgttaaacggattaatatatgttataggtggaatcgttaaaggtgacacgtgtaccgacgcactagagagtttatcagaagatggatggatgaagcatcaacgtcttccaataaaaatgtccaatatgtcgacgattgttcatgatggcaagatttatatatctggaggttacaacaatagtagtgtagttaatgtaatatcgaatttagtccttagctataattcgatatatgatgaatggaccaaattatcatcattaaacattcctagaattaatcccgctctatggtcagcgcataataaattatatgtaggaggaggaatatctgatgatgttcgaactaatacatctgaaacatacgacaaagaaaaagattgttggacattggataatggtcacgtgttaccacgcaattatataatgtataaatgcgaaccgattaaacataaatatccattggaaaaaacacagtacacgaatgattttctaaagtatttggaaagttttataggtagttgatagaacaaaatacataattttgtaaaaataaatcactttttatactaatatgacacgattaccaatacttttgttactaatatcattagtatacgctacaccttttcctcagacatctaaaaaaataggtgatgatgcaactctatcatgtaatcgaaataatacaaatgactacgttgttatgagtgcttggtataaggagcccaattccattattcttttagctgctaaaagcgacgtcttgtattttgataattataccaaggataaaatatcttacgactctccatacgatgatctagttacaactatcacaattaaatcattgactgctagagatgccggtacttatgtatgtgcattctttatgacatcgcctacaaatgacactgataaagtagattatgaagaatactccacagagttgattgtaaatacagatagtgaatcgactatagacataatactatctggatctacacattcaccggaaactagttctgagaaacctgattatatagataattctaattgctcgtcggtattcgaaatcgcgactccggaaccaattactgataatgtagaagatcatacagacaccgtcacatacactagtgatagcattaatacagtaagtgcatcatctggagaatccacaacagacgagactccggaaccaattactgataaagaagatcatacagtcacagacactgtctcatacactacagtaagtacatcatctggaattgtcactactaaatcaaccaccgatgatacgtacaatgataatgatacagtaccaccaactactgtaggcggtagtacaacctctattagcaattataaaaccaaggactttgtagaaatatttggtattaccgcattaattatattgtcggccgtggcaatattctgtattacgtattatatatgtaataaacgttcacgtaaatacaaaacagagaacaaagtctagatttttgacttacataaatgtctgggatagtaaaatctatcatattgagcgggccatctggtttaggaaagacagccatagccaaaagactatgggaatatatttggatttgtggtgtcccataccactagatttcctcgtcctatggaacgagaaggtgtcgattaccattacgttaacagagaggccatctggaagggaatagccgccggaaactttctagaacatactgagtttttaggaaatatttacggaacttctaaaactgctgtgaatacagcggctattaataatcgtatttgtgtgatggatctaaacatcgatggcgttagaagtcttaaaaatacgtacctaatgccttactcggtgtatataagacctacctctcttaaaatggttgagaccaagcttcgttgtagaaacactgaagcggatgatgagattcatcgtcgtgtgatgttggcaaaaactgacatggatgaggcaggtgaagccggtctattcgacactattatcattgaagatgatgtgaatttagcatatagtaagttaattcagatactacaggaccgtattagaatgtattttaacactaattagagacttaagacttaaaacttgataattaataatataactcgtttttatatgtggctatttcaacgtctaatgtattagttaaatattaaaacttaccacgtaaaacttaaaatttaaaatgatatttcattgacagatagatcacacattatgaactttcaaggacttgtgttaactgacaattgcaaaaatcaatgggtcgttggaccattaataggaaaaggtggatttggtagtatttatactactaatgacaataattatgtagtaaaaatagagcccaaagctaacggatcattatttaccgaacaggcattttatactagagtacttaaaccatccgttatcgaagaatggaaaaaatctcacaatataaagcacgtaggtcttatcacgtgcaaggcatttggtctatacaaatccattaatgtggaatatcgattcttggtaattaatagattaggtgcagatctagatgcggtgatcagagccaataataatagactaccaaaaaggtcggtgatgttgatcggaatcgaaatcttaaataccatacaatttatgcacgagcaaggatattctcacggagatattaaagcgagtaatatagtcttggatcaaatagataagaataaattatatctagtggattacggattggtttctaaattcatgtctaatggcgaacatgttccatttataagaaatccaaataaaatggataacggtactctagaatttacacctatagattcgcataaaggatacgttgtatctagacgtggagatctagaaacacttggatattgtatgattagatggttgggaggtatcttgccatggactaagatatctgaaacaaagaattgtgcattagtaagtgccacaaaacagaaatatgttaataatactgcgactttgttaatgaccagtttgcaatatgaacctagagaattgctgcaatatattaccatggtaaactctttgacatattttgaggaacccaattacgacaagtttcggcacatattaatgcagggtgtatattattaagtgtggtgtttggtcgataaaaattaaaaaataacttaatttattattgatctcgtgtgtacaaccgaaatcatggcgatgttttacgcacacgctctcggtgggtacgacgagaatcttcatgcctttcctggaatatcatcgactgttgccaatgatgtcaggaaatattctgttgtgtcagtttataataacaagtatgacattgtaaaagacaaatatatgtggtgttacagtcaggtgaacaagagatatattggagcactgctgcctatgtttgagtgcaatgaatatctacaaattggaaatccgatccatgatcaagaaggaaatcaaatctctatcatcacatatcgccacaaaaactactatgctctaagcggaatcgggtacgagagtctagacttgtgtttggaaggagtagggattcatcatcacgtacttgaaacaggaaacgctgtatatggaaaagttcaacatgattattctactatcaaagagaaggccaaagaaatgagtgcacttagtccaggacctatcatcgattaccacgtctggataggagattgtatctgtcaagttactgctgtggacgtacatggaaaggaaattatgaaaatgagattcaaaaagggtgcggtgcttccgatcccaaatctggtaaaagttaaacttggggagaatgatacagaaaatctttcttctactatatcggcgacaccatcgaggtaaccacctctctggaagacagcgtgaataatgtactcatgaaacgtttggaaactatacgccatatgtggtctgttgtatatgatcattttgatattgtgaatggtaaagaatgctgttatgtgcatacgcatttgtctaatcaaaatcttataccgagtactgtaaaaacaaatttgtacatgaagactatgggatcatgcattcaaatggattccatggaagctctagagtatcttagcgaactgaaggaatcaggtggatggagtcccagaccagaaatgcaggaatttgaatatccagatggagtggaagacactgaatcaattgagagattggtagaggagttcttcaatagatcagaacttcaggctggtgaatcagtcaaatttggtaattctattaatgttaaacatacatctgtttcagctaagcaactaagaacacgtatacggcagcagcttccttctatactctcatcttttaccaacacaaagggtggatatttgttcattggagttgataataatacacacaaagtatttggattcacggtgggttacgactacctcagactgatagagaatgatatagaaaagcatatcaaaagactttgtgttgtgtatttctgtgagaagaaagaggacatcaagtacgcgtgtcgattcatcaaggtatataaacctggggatgaggctacctcgacatacgtgtgcgctatcaaagtggaaagatgctgttgtgctgtgtttgcagattggccagaatcatggtatatggatactaatggtatcaagaagtattctccagatgaatgggtgtcacatataaaattttaattaatgtaactatagagaacaaataataaggttgtaatatcatatagacaataactaacaattaattagtaactgttatctcttttttaattaaccaactaactatatacctattaatacatcgtaattatagttcttaacatctattaatcattaattcgcttctttaattttttataaactaacattgttaattgaaaagggataacatgttacagaatataaattatatatggatttttttaaaaaggaaatacttgactggagtatatatttatctcttcattatatagcacgcgtgttttccaatttttccacatcccatataatacaggattataatctcgttcgaacatacgagaaagtggataaaacaatagttgattttttatctaggttgccaaatttattccatattttagaatatggggaaaatattctacatatttattctatggatgatgctaatacgaatattataattttttttctagatagagtattaaatattaataagaacgggtcatttatacacaatctcgggttatcatcatccattaatataaaagaatatgtatatcaattagttaataatgatcatccagataataggataagactaatgcttgaaaatggacgtagaacaagacattttttgtcctatatatcagatacagttaatatctatatatgtattttaataaatcatggattttatatagatgccgaagacagttacggttgtacattattacatagatgtatatatcactataagaaatcagaatcagaatcatacaatgaattaattaagatattgttaaataatggatcagatgtagataaaaaagatacgtacggaaacacaccttttatcctattatgtaaacacgatatcaacaacgtggaattgtttgagatatgtttagagaatgctaatatagactctgtagactttaatagatatacacctcttcattatgtctcatgtcgtaataaatatgattttgtaaagttattaatttctaaaggagcaaatgttaatgcgcgtaataaattcggaactactccattttattgtggaattatacacggtatctcgcttataaaactatatttggaatcagacacagagttagaaatagataatgaacatatagttcgtcatttaataatttttgatgctgttgaatctttagattatctattatccagaggagttattgatattaactatcgtactatatacaacgaaacatctatttacgacgctgtcagttataatgcgtataatacgttggtctatctattaaacaaaaatggtgattttgagacgattactactagtggatgtacatgtatttcggaagcagtcgcaaacaacaacaaaataataatggaagtactattgtctaaacgaccatctttgaaaattatgatacagtctatgatagcaattactaaacataaacagcataatgcagatttattgaaaatgtgtataaaatatactgcgtgtatgaccgattatgatactcttatagatgtacagtcgctacagcaatataaatggtatattttaagatgtttcgatgaaatagatatcatgaagagatgttatataaaaaataaaactgtattccaattagttttttgtatcaaagacattaatactttaatgagatacggtaaacatccttctttcgtgaaatgcactagtctcgacgtatacggaagtcgtgtacgtaatatcatagcatctattagatatcgtcagagattaattagtctattatccaagaagctggatcctggagataaatggtcgtgttttcctaacgaaataaaatataaaatattggaaaactttaacgataacgaactatccacatatctaaaaatcttataaacattattaaaatataaaatctaagtaggataaaatcacactacatcattgtttccttttagtgctcgacagtgtatactatttttaacgctcataaataaaaatgaaaacgatttccgttgttacgttgttatgcgtactacctgctgttgtttattcaacatgtactgtacccactatgaataacgctaaattaacgtctaccgaaacatcgtttaatgataaccagaaagttacgtttacatgtgatcagggatatcattctttggatccaaatgctgtctgtgaaacagataaatggaaatacgaaaatccatgcaaaaaaatgtgcacagtttctgattatgtctctgaactatataataaaccgctatacgaagtgaattccaccatgacactaagttgcaacggcgaaacaaaatattttcgttgcgaagaaaaaaatggaaatacttcttggaatgatactgttacgtgtcctaatgcggaatgtcaacctcttcaattagaacacggatcgtgtcaaccagttaaagaaaaatactcatttggggaatatatgactatcaactgtgatgttggatatgaggttattggtgcttcgtacataagttgtacagctaattcttggaatgttattccatcatgtcaacaaaaatgtgatatgccgtctctatctaacggattaatttccggatctacattttctatcggtggcgttatacatcttagttgtaaaagtggttttacactaacggggtctccatcatccacatgtatcgacggtaaatggaatcccatactcccaatatgtgtacgaactaacgaaaaatttgatccagtggatgatggtcccgacgatgagacagatttgagcaaactctcgaaagacgttgtacaatatgaacaagaaatagaatcgttagaagcaacttatcatataatcatagtggcgttgacaattatgggcgtcatatttttaatctccgttatagtattagtttgttcctgtgacaaaaataatgaccaatataagttccataaattgctaccgtaaatataaatccgttaaaataattaataatttaataacaaacaagtatcaaaagattaaagacttatagctagaatcaattgagatgtcttcttcagtggatgttgatatctacgatgccgttagagcatttttactcaggcactattataacaagagatttattgtgtatggaagaagtaacgccatattacataatatatacaggctatttacaagatgcgccgttataccgttcgatgatatagtacgtactatgccaaatgaatcacgtgttaaacaatgggtgatggatacacttaatggtataatgatgaatgaacgcgatgtttctgtaagcgttggcaccggaatactattcatggaaatgtttttcgattacaataaaaatagtatcaacaatcaactaatgtatgatataattaatagcgtatctataattctagctaatgagagatatagaagcgcttttaacgacgatggtatatacatccgtagaaatatgattaacaagttgtacggatacgcatctctaactactattggcacgatcgctggaggtgtttgttattatctgttgatgcatctagttagtttgtataaataattatttcaatatactagttaaaattttaagattttaaatgtataaaaaactaataacgtttttatttgtaataggtgcagtagcatcctattcgaataatgagtacactccgtttaataaactgagtgtaaaactctatatagatggagtagataatatagaaaattcatatactgatgataataatgaattggtgttaaattttaaagagtacacaatttctattattacagagtcatgcgacgtcggatttgattccatagatatagatgttataaacgactataaaattattgatatgtataccattgactcgtctactattcaacgcagaggtcacacgtgtagaatatctaccaaattatcatgccattatgataagtacccttatattcacaaatatgatggtgatgagcgacaatattctattactgcagagggaaaatgctataaaggaataaaatatgaaataagtatgatcaacgatgatactctattgagaaaacatactcttaaaattggatctacttatatatttgatcgtcatggacatagtaatacatattattcaaaatatgatttttaaaaatttaaaatatattatcacttcagtgacagtagtcaaataacaaacaacaccatgagatatattataattctcgcagttttgttcattaatagtatacatgctaaaataactagttataagtttgaatccgtcaattttgattccaaaattgaatggactggggatggtctatacaatatatcccttaaaaattatggcatcaagacgtggcaaacaatgtatacaaatgtaccagaaggaacatacgacatatccgcatttccaaagaatgatttcgtatctttctgggttaaatttgaacaaggcgattataaagtggaagagtattgtacgggactatgcgtcgaagtaaaaattggaccaccgactgtaacattgactgaatacgacgaccatatcaatttgtacatcgagcatccgtatgctactagaggtagcaaaaagattcctatttacaaacgcggtgacatgtgtgatatctacttgttgtatacggctaacttcacattcggaaattctaaagaaccagtaccatatgatatcgatgactacgattgcacgtctacaggttgcagcatagactttgccacaacagaaaaagtgtgcgtgacagcacagggagccacagaagggtttctcgaaaaaattactccatggagttcgaaagtatgtctgacacctaaaaagagtgtatatacatgcgcaattagatccaaagaagatgttcccaatttcaaggacaaaatggccagagttatcaagagaaaatttaatacacagtctcaatcttatttaactaaatttctcggtagcacatcaaatgatgttaccacttttcttagcatgcttaacttgactaaatattcataactaatttttattaatgaaataaaactgcatattatacactggttaacgcccttataggctctaaccattttcaagatgaggtccctgattatagtccttctgttcccctccatgtctattagacgatgtgagaagactgaagaggaaacatggggattgaaaatagggttgtgtataattgccaaagatttttatcccgaaagaactgattgcagtgttcatctcccaactgcaagtgaaggattcagggatatacgaaacaccgataaattataaaaaaagcaatgtgtccgctgtttccgttaataatactattttcgtaactggcggattattcataaataactctaatagcacgatcgtggacatttataaagacaaacaatggtcgattatagaaatgcctatggctagggtatatcacggcatcgactcgacatttggaatgttatattttgccggaggtctatccgttaccgaacaatatggtaatttagagaaaaacaacgagatatcttgttacaatcctagaacgaataagtggtttgatatttcatatactatttataagatatccatatcatcattgtgtaaactaaataacgtcttctatgtatttagtaaggacattggatatgtggaaaagtatgatggtgcatggaagttagtacatgatcgtctccccgctataaaggcattatcaacttctccttattgattgaaaatataaatagtttttatgtatagcagtattaccctatagttttattgcttactactaacatggatacagatacagatacagatacagatacagatacagatacagatgttacaaatgtagaagatatcataaatgaaatagatagagagaaagaagaaatactaaaaaatgtagaaattgaaaataataaaaacattaacaagaatcatcccaatgaatatattagagaagcactcgttattaataccagtagtaatagtgattccattgataaagaagttatagaatgtatcagtcacgatgtaggaatatagatcatatctactaatttttataatcgatacaaaacataaaaaacaactcgttattacatagcaggcatggaatccttcaagtattgttttgataacgatggcaagaaatggattatcggaaatactttatattctggtaattcaatactatataaggtcagaaaaaatttcactagttcgttctacaattacgtaatgaagatagatcacaaatcacacaagccattgttgtctgaaatacgattctatatatctgtattggatcctttgactatcgacaactggacacgggaacgtggtataaagtatttggctattccagatctgtatggaattggagaaaccgatgattatatgttcttcgttataaagaattcgggaagagtattcgccccaaaggatactgaatcagtcttcgaagcatgcgtcactatgataaacacgttagagtttatacactctcaaggatttacccatggaaaaatagaaccgaggaatatactgattagaaataaacgtctttcactaattgactattctagaactaacaaactatacaagagtggaaactcacatatagattacaacgaggacatgataacttcaggaaatatcaattatatgtgtgtagacaatcatcttggagcaacagtttcaagacgaggagatttagaaatgttgggatattgcatgatagaatggttcggtggcaaacttccatggaaaaacgaaagtagtataaaagtaataaaacaaaaaaaagaatataaaaaatttatagctactttctttgaggactgttttcctgaaggaaatgaacctctggaattagttagatatatagaattagtatacacgttagattattctcaaactcctaattatgacagactacgtaaactgtttatacaagattgaaattatattcttttttttatagagtgtggtagtgttacggatatttaatattagactatctctatcgcgctacacgaccaatatcgattactatggatatcttctatgaaaggagagaatgtattcatttctccagcgtcaatctcgtcagtattgacaatactgtattatggagctaatggatccactgctgaacagctatcgaaatatgtagaaaaggaggagaacacggataaggttagcgctcagaatatctcattcaaatccatgaataaagtatatgggcgatattctgccgtgtttaaagatttctttttgggaaaaattggcgataagtttcaaactgttgacttcactgattgtcgcactatagatgcaatcaacaagtgtgtagatatctttactgaggggaaaatcaatccactattggatgaaccattgtctcctagcaattagtgccgtatactttaaagcaaaatggttgacgccattcgaaaaggaatttaccagtgattatcccttttacgtatctccgacggaaatggtagacgtaagtatgatgtctatgtacggcgagctatttaatcacgcatctgtaaaagaatcattcggcaacttttcaatcatagaactgccatatgttggagatactagtatgatggtcattcttccagacaagattgatggattagaatccatagaacaaaatctaacagatacaaattttaagaaatggtgtgactctctggaagctacgtttatcgatgttcacattcccaagtttaaggtaacaggctcgtataatctggtggatactctagtaaagtcaggactgacagaggtgttcggttcaactggagattatagcaatatgtgtaatttagatgtgagtgtcgacgctatgatccacaaaacgtatatagatgtcaatgaagagtatacagaagcagctgcagcaacttctgtactagtggcagactgtgcatcaacaattacaaatgagttctgtgtagatcatccgttcatctatgtgattaggcatgttgatggcaaaattcttttcgttggtagatattgctctccgacaactaattgttaaccattttttttaaaaaaaatagaaaaaacatgtggtattagtgcaggtcgttgttcttccaattgcaattggtaagatgacggccaactttagtacccacgtcttttcaccacagcactgtggatgtgacagactgaccagtattgatgacgtcaaacaatgtttgactgaatatatttattggtcgtcctatgcataccgcaacaggcaatgcgctggacaattgtattccacactcctctcttttagagatgatgcggaattagtgttcatcgacattcgcgagctggtaaaaaatatgccgtgggatgatgtcaaagattgtacagaaatcatccgttgttatataccggatgagcaaaaaaccatcagagagatttcggccatcatcggactttgtgcatatgctgctacttactggggaggtgaagaccatcccactagtaacagtctgaacgcattgtttgtgatgcttgagatgctaaattacgtggattataacatcatattccggcgtatgaattgatgagttgtacatcttgacattttctttcttctcttctccctttcttctcttctccctttcttctcttctcccttcctccctcttctccctttcccagaaacaaacttttttacccactataaaataaaatgagtatactacctgttatatttctttctatatttttttattcttcattcgttcagacttttaacgcgcctgaatgtatcgacaaagggcaatattttgcatcattcatggagttagaaaacgagccagtaatcttaccatgtcctcaaataaatacgctatcatccggatataatatattagatattttatgggaaaaacgaggagcggataatgatagaattataccgatagataatggtagcaatatgctaattctgaacccgacacaatcagactctggtatttatatatgcattaccacgaacgaaacctactgtgacatgatgtcgttaaatttgacaatcgtgtctgtctcagaatcaaatatagatcttatctcgtatccacaaatagtaaatgagagatctactggcgaaatggtatgtcccaatattaatgcatttattgctagtaacgtaaacgcagatattatatggagcggacatcgacgccttagaaataagagacttaaacaacggacacctggaattattaccatagaagatgttagaaaaaatgatgctggttattatacatgtgttttagaatatatatacagaggtaaaacatataacgtaaccagaattgtaaaattagaggtacgggataaaataataccttctattatgcaattaccagatggcattgtaacttcaataggtagtaatttgactattgcgtgtagagtatcgttgagacctcccacaacggatgcagacgtcttttggataagtaatggtatgtattacgaagaagatgatggggacggaaacggtagaataagtgtagcaaataaaatctatatgaccgataagagacgtgttattacatcccggttaaacattaatcctgtcaaggaagaagatgctacaacgtttacgtgtatggcgtttactattcctagcatcagcaaaacagttactgttagtataacgtgaatgtatgttgttacatttccatgtcaattgagtttataagaatttttatacattatcttccaacaaacaattgacgaacgtattgctatgattaactcccacgatactatgcatattattaatcattaacttgcaaactatacctagtgctattttgacatactcatgttcttgtgtaattgcggtatctatattattaaagtacgtaaatctagctatagttttattatttaattttagataatataccgtctccttatttttaaaaattgccacatcctttattaaatcatgaatgggaatttctatgtcatcgttagtatattgtgaacaacaagagcagatatctataggaaagggtggaatgcgatacattgatctatgtagttttaaaacacacgcgaactttgaagaatttatataaatcattccatcgatacatccttctatgttgagatgtatatatccaggaattcgtttattaatatcgggaaatgtataaactaaaacattgcccgaaagcggtgcctctatctgcgttatatccgttcttaacttacaaaatgtaaccaatacctttgcatgacttgttttgttcggcaacgttagtttaaacttgacgaatggattaattacaatagcatgatccgcgcatctattaagtttttttactttaacgcccttgtatgtttttacagagactttatctaaatttctagtgcttgtatgtgttataaatataacgggatatagaaccgaatcacctaccttagatacccaattacattttatcagatccagataataaacaaattttgtcgccctaactaattctatattgttatatattttacaattggttatgatatcatgtaataacttggagtctaacgcgcatcgtcgtacgtttatacaattgtgatttagtgtagtatatctacacatgtatttttccgcactatagtattctggactagtgataaaactatcgttatatctgtcttcaatgaactcatcgagatattgctctctgtcatattcatacacctgcataaactttctagacatcttacaatccgtgttattttaggatcatatttacatatttacgggtatatcaaagatgttagattagttaatgggaatcgtctataataatgaatattaaacaattatatgaggacttttaccacaaagcatcataaaaatgagtcgtcgtctgatttatgttttaaatatcaaccgcgaatcaactcataaaatacaagagaatgaaatatatacatattttagtcattgcaatatagaccatacttctacagaacttgattttgtagttaaaaactatgatctaaacagacgacaacctgtaactgggtatactgcactacactgctatttgtataataattactttacaaacgatgtactgaagatattattaaatcatggagtggatgtaacgatgaaaaccagtagcggacgtatgcctgtttatatattgcttactagatgttgcaatatttcacatgatgtagtgatagatatgatagacaaagataaaaaccacttatcgcatagagactattccaacctactactagagtatataaaatctcgttacatgttattgaaggaagaggatatcgatgagaacatagtatccactttattagataagggaatcgatcctaactttaaacaagacggatatacagcgttacattattattatttgtgtctcgcacacgtttataaaccaggtgagtgtagaaaaccgataacgataaaaaaggccaagcgaattatttctttgtttatacaacatggagctaatctaaacgcgttagataattgtggtaatacaccattccatttgtatcttagtattgaaatgtgtaataatattcatatgactaaaatgctgttgacttttaatccgaatttcgaaatatgtaataatcatggattaacgcctatactatgttatataacttccgactacatacaacacgatattcttgttatgttaatacatcactatgaaacaaatgttggagaaatgccgatagatgagcgtcgtatgatcgtattcgagtttatcaaaacatattctacacgtccggcagattcgataacttatttgatgaataggtttaaaaatataaatatttatacccgctatgaaggaaagacattattacacgtagcatgtgaatataataatacacaagtaatagattatcttatacgtatcaacggagatataaatgcgttaaccgacaataacaaacacgctacacaactcattatagataacaaagaaaattccccatataccattaattgtttactgtatatacttagatatattgtagataagaatgtgataagatcgttggtggatcaacttccatctctacctatctttcgtcgcttatcatactagtcatatcctaaatgttgatcatattccaccaaatgattgtgaaagagattgagattaaatcgtctaacaaacaattagtttttatgacattaacatataataaataaattaatcattattgacttaacgatgacgaaagttatcatcatcttaggattcttgattattaatacaaattcattgtctatgaaatgtgaacaaggtgtctcatattataattcacaagaattaaagtgttgtaaactatgtaagccaggaacatattcagatcatcgatgtgataaatacagcgataccatttgtggacattgtccgagtgacacattcacgtcaatatataatcgttctccttggtgtcatagttgtagaggtccatgtggtactaatcgagtagaggtcacaccttgtacacctaccacaaatagaatctgtcattgtgactcgaatagttattgtctccttaaagcttctgatggtaactgtgttacatgtgctcctaaaacaaaatgtggtcgtgggtatggaaagaaaggagaagatgaaatgggtaataccatttgtaagaaatgtcggaagggtacttattcagatattgtatctgactctgatcaatgtaaaccaatgacaagataagacttactcgcatctactggatagacataaaatatcctcctcgtaataatgaaatataatatacactaattattaatatcaataacaatcgagtattaatatataggtcatttttaaatcccttttgggttccgtcccaaacggcgtttcggtctgcgtcgccgccatggccatgccgagcctctccgcgtgctcctccatcgaggacgacttcaactatggcagctcggtggcgtctgccagcgtgcacatacgaatggcatttctaagaaaagtctacggtatcctttgtctacaatttcttttaacaacggcaacaactgcagtatttttatactttgactgcatgcggacatttatacaagggagtcctgttctaatattggcatcaatgttcggatctataggcttgattttcgcattgactttacacagacataaacatcccctgaatctgtacctgctttgtggatttacactgtcggaatctctaacgctggcctctgttgttactttctatgatgtgcatgtcgttatgcaagctttcatgctgactactgcagcgtttcttgctctgactacatatactctacaatcaaagagagatttcagtaaacttggagcaggattgtttgctgctttgtggattttaattttgtcaggactcttggggatatttgtgcaaaatgagacagtggagctggtcctgtctgcttttggggcccttgtattctgtggattcattatctatgacacgcactcactaatacataagctctcgcctgaagagtatgtgttagcctctatcaatctctacttggatatcatcaatctgttcttgcatctgttgcagcttttggaagtatctaataagaaataaagtttaaaatagaattaataaaaacatataggtcattttttaaacatggattggaaaccaaggtagttagttaatacacacaagatatatttttttcacatcatccacccatgggtaacaccaaggttgttagttaataatatacaagatattttttctcactctgatccatgtaaaccaaggacgagataagacactctcattcctcatccacaacccattaaaaaaatggaaattaaagccctctattagcataaacggctacaggtctacctttacaatggcctttccttgtgcccagttcagaccctgtcattgccacgctactaaggactccctgaataccgtggccgacgtcagacattgtctgactgaatacatcctgtgggtttctcatagatggacccatagagaaagcgcagggtctctctacaggcttctcatctctttcagaactgatgcaacggagctctttggtggtgagttgaaggattcacttccgtgggacaattgcgtggagatcattaaatgtttcatcagaaatgactccatgaaaaccgccgaagaacttcgtgcaatcattggactttgtactcaatcagctatcgtctctggaagagtcttcaacgataagtatatcgacatactacttatgctgcgaaagattctgaacgagaacgactatctcaccctcttggatcatatccgcactgctaaatactaaatctccttcatgctctctcactacactttttatcatcttatgaggaatgattgccttcgtgaaataggaataattagcaccagaatagctatggattattgtggtagagagtgcactattctatgtcgtctactggatgaagatgtgacgtacaaaaaaataaaaccagagattgaaacgtgtcacaacttatcaaaacatatagatagacgaggaaacaatgcgctacattgttacgtcttcaataaatgcgatacagacattaagattgttcggctgttactctctcgcggagtcgagagactttgtagaaacaacgaaggattaactccgctaggagcatacagtaagcatagatacgtaaaatctcagattgtgcatctactgatatccagctattcaaattcctctaacgaactcaagtcgaatataaatgatttcgatctgtattcggataatatcgacttacgtctgctaaaatacctaattgtggataaacggatacgtccgtccaagaatacgaattatgcaatcaatggtctcggattggtggatatatacgtaacgacgcctaatccgagaccagaagtattgctatggcttcttaaatcagaatgttacagcaccggttacgtatttcgtacctgtatgtacgacagtgatatgtgtaagaactctcttcattactatatatcgtctcatagagaatctcaatctctatccaaggatgtaattaaatgtttgatcgataacaatgtttccatccatggcagagacgaaggaggatctttacccatccaatactactggtctttctcaaccatagatatagagattgttaaattattattaataaaggatgtggacacgtgtagagtatacgacgtcagccctatattagaggcgtattatctaaacaagcgatttagagtaaccccatataatgtagacatggaaatcgttaatcttcttattgagagacgtcatactcttgtcgacgtaatgcgtagtattacttcgtacgattccagagaatataaccactacatcatcgataacattctaaagagatttagacaacaggatgtacaagccatgttgataaactacttacattacggcgatatggtcgttcgatgcatgttagataacggacaacaactatcctctgcacgactactttgttaataataatctcgtcgatgtaaacgtcgtaaggtttatcgtggaaaatatggacacgcggctgtaaatcacgtatcgaacaatggccgtctatgtatgtacggtctgatattatcgagatttaataattgcgggtatcactgttatgaaaccatactgatagatgtatttgatatactaagcaagtacatggatgatatagatatgatcgataactctactatattacgcggtcgatgtcaataatatacaatttgcaaagcggttattggaatatggagcgagtgtcacgctcgataatcaatacggccatccagaaaagcagttaccaaagagaaaacaaaacgaagctagttgatttattactgagttaccatcccactctagagactatgattgacgcatttaatagagatatacgctatctatatcctgaaccattattcgcctgtatcagatacgccttaatcctagatgatgattttccttctaaagtaaagtatgatatcgccggtcgtcataaggaactaaagcgctatagagtagacattaatagaatgaagaatgtctacatatcaggcgtctccatgtttgatatattatttaaacgaagcaaacgccacaaattgagatacgcaaagaatccgacatcaaatggtacaaaaaagaactaacgtccatcattacagaaactgtaaagaacaatgagaggatcgactccatagtggacaacattaatacagacgataacttgatttcgaaattacccatggagatactttattactccattaaataatttatcatggagcgataatgtcctgtttcatttgtttccatgacatattacaaaatcgattccgtccaagatgataaaaacatttaccggcatcataaacacggagtttattttatatgtctcgcataaacattactaaaaaaatatattgttcggttttctttcacatctttaattatgaaaaagtaaatcattatgagatggacgagattgtacgcatcgttcgcgacagtatgtggtacatacctaacgtatttatggacgacggtaagaatgaaggtcacgtttctgtcaacaatgtctgtcatatgtattttacgttctttgatgtggatacatcgtctcatctgtttaagctagttattaaacactgcgatctgaataaacgaggtaactctccattacattgctatacgatgaatacacgatttaatccatctgtattaaagatattgttacaccacggcatgcgtaactttgatagcaaggatgaccactatcaatcgataacaagatctttgatatactaacggacaccattgatgactttagtaaatcatccgatctattgctgtgttatcttagatataaattcaatgggagcttaaactattacgttctgtacaaaggatccgaccctaattgcgccgacgaggatgaactcacttctcttcattactactgtaaacacatatccacgttctacgaaagcaattattacaagttaagtcacactaagatgcgagccgagaagcgattcatctacgcgataatagattatggagcaaacattaacgcggttacacacttaccttcaacagtataccaaacatagtcctcgtgtggtgtatgctcttttatctcgaggatacgtaataatcttgattgtacacccatcatggaacgattgtgcaacaggtcatattctcataatgttactcaattggcacgaacaaaaggaagaaggacaacatctactttatctattcataaaacataatcaaggatacactctcaatatactacggtatctattagataggttcgacattcagaaagacgaatactataataccgcctttcaaaattgtaacaacaatgttgcctcatacatcggatacgacatcaaccttccgactaaagacggtattcgacttggtgtttgaaaacagaaacatcatatacaaggcggatgttgtgaatgacatcatccaccacagactgaaagtatctctacctatgattaaatcgttgttctacaagatgtctctccctacgacgattactacgtaaaaaagatactagcctactgcctattaagggacgagtcattcgcggaactacatagtaaattctgtttaaacgaggactataaaagtgtatttatgaaaaatatatcattcgataagatagattccatcatcgtgacataagtcgcctcaaagagattcgaatctccgacaccgacctgtatacggtatcacagctatcttaaagccatacattcagacagtcacatttcatttcccatgtacgacgatctcatagaacagtgccatctatcgatggagcgtaaaagtaaactcgtcgacaaagcactcaataaattagagtctaccatcggtcaatctagactatcgtatttgcctccggaaattatgcgcaatatcatctaaacagtatgttgtacggaaagaaccattacaaatattatccatgatagaaagaaaatatctatatgattggagaagtaggaaacaggaacaagacaacgattactacattattaaatcatgaagtccgtattatactcgtatatattgtttctctcatgtataataataaacggaagagatatagcaccgcatgcaccatccgatggaaagtgtaaagacaacgaatacaaacgccataatttgtgtccgggaacatacgcttccagattatgcgatagcaagactaacacacgatgtacgccgtgtggttcgggtaccttcacatctcgcaataatcatttacccgcttgtctaagttgtaacggaagacgcgatcgtgtaacacgactcacaatagaatctgtgaatgctctcccggatattattgtcttctcaaaggatcatccggatgcaaggcatgtgtttcccaaacaaaatgtggaataggatacggagtatccggagacgtcatctgttctccgtgtggtctcggaacatattctcacaccgtctcttccgcagataaatgcgaacccgtacccagaaatacgtttaactatatcgatgtggaaattaacctgtatccagttaacgacacgtcgtgtactcggacgaccactaccggtctcagcgaatccatctcaacgtcggaactaactattactatgaatcataaagactgtaatcccgtatttcgtgatggatacttctccgttcttaataaggtagcgacttcaggtttctttacaggagaaaggtgtgcactctgaatttcgagattaaatgcaataacaaagattcttcctccaaacagttaacgaaagcaaagaatgatactatcatgccgcattcggagacagtaactctagtgggcgacatctatatactatatagtaataccaatactcaagactacgaaactgatacaatctcttatcatgtgggtaatgttctcgatgtcgatagccatatgcccggtagttgcgatatacataaactgatcactaattccaaacccacccactttttatagtaagtttttcacccataaataataaatacaataattaatttctcgtaaaagtagaaaatatattctaatttattgcacggtaaggaagtagaatcataaagaacagtactcaatcaatagcaattatgaaacaatatatcgtcctggcatgcatgtgcctggcggcagctgctatgcctgccagtcttcagcaatcatcctcatcctcctcctcgtgtacggaagaagaaaacaaacatcatatgggaatcgatgttattatcaaagtcacaaagcaagaccaaacaccgaccaatgataagatttgccaatccgtaacggaaattacagagtccgagtcagatccagatcccgaggtggaatcagaagatgattccacatcagtcgaggatgtagatcctcctaccacttattactccatcatcggtggaggtctgagaatgaactttggattcaccaaatgtcctcagattaaatccatctcagaatccgctgatggaaacacagtgaatgctagattgtccagcgtgtccccaggacaaggtaaggactctcccgcgatcactcatgaagaagctcttgctatgatcaaagactgtgaagtgtctatcgacatcagatgtagcgaagaagagaaagacagcgacatcaagacccatccagtactcgggtctaacatctctcataagaaagtgagttacgaagatatcatcggttcaacgatcgtcgatacaaaatgcgtcaagaatctagagtttagcgttcgtatcggagacatgtgcaaggaatcatctgaacttgaggtcaaggatggattcaagtatgtcgacggatcggcatctgaaggtgcaaccgatgatacttcactcatcgattcaacaaaactcaaagcgtgtgtctgaatcgataactctattcatctgaaattggatgagtagggttaatcgaacgattcaggcacaccacgaattaaaaaagtgtaccggacactatattccggtttgcaaaacaaaaatgttcttaactacattcacaaaaagttacctctcgcgacttcttctttttctgtctcaatagtgtgatacgattatgacactattcctattcctattcctatttcctttcagagtatcacaaaaatattaaacctctttctgatggtctcataaaaaaagttttacaaaaatatttttattctctttctctctttgatggtctcataaaaaaagttttacaaaaatatttttattctctttctctctttgatggtctcataaaaaaagttttacaaaaatatttttattctctttctctctttgatggtctcataaaaaaagttttacaaaaatatttttattctctttctctctttgatggtctcataaaaaaagttttacaaaaatatttttattctctttctctctttgatggtctcataaaaaaagttttacaaaaatatttttattctctttctctctttgatggtctcataaaaaaagttttacaaaaatatttttattctctttctctctttgatggtctcataaaaaaagttttacaaaaatatttttattctctttctctctttgatggtctcataaaaaaagttttacaaaaatatttttattctctttctctctttgatggtctcataaaaaaagttttacaaaaatatttttattctctttctctctttgatggtctcataaaaaaagttttacaaaaatatttttattctctttctctctttgatggtctcataaaaaaagttttacaaaaatatttttattctctttctctctttgatggtctcataaaaaaagttttacaaaaatatttttattctctttctctctttgatggtctcataaaaaaagttttacaaaaatatttttattctctttctctctttgatggtctcataaaaaaagttttacaaaaatatttttattctctttctctctttgatggtctcataaaaaaagttttacaaaaatatttttattctctttctctctttgatggtctcataaaaaaagttttacaaaaatatttttattctctttctctctttgatggtctcataaaaaaagttttacaaaaatatttttattctctttctctctttgatggtctcataaaaaagttttacaaaaatatttttattctctttctctctttgat

SEQ ID NO: 10 - DNA, 194908 bp, Vaccinia virus
  GLV-1h64
ttatgagaccatcaaagagagaaagagaataaaaatatttttgtaaaactttttttatgagaccatcaaagagagaaagagaataaaaatatttttgtaaaacttttttatgagaccatcaaagagagaaagagaataaaaatatttttgtaaaacttttttatgagaccatcaaagagagaaagagaataaaaatatttttgtaaaactttttttatgagaccatcaaagagagaaagagaataaaaatatttttgtaaaactttttttatgagaccatcaaagagagaaagagaataaaaatatttttgtaaaactttttttatgagaccatcaaagagagaaagagaataaaaatatttttgtaaaactttttttatgagaccatcaaagagagaaagagaataaaaatatttttgtaaaactttttttatgagaccatcaaagagagaaagagaataaaaatatttttgtaaaactttttttatgagaccatcaaagagagaaagagaataaaaatatttttgtaaaactttttttatgagaccatcaaagagagaaagagaataaaaatatttttgtaaaactttttttatgagaccatcaaagagagaaagagaataaaaatatttttgtaaaactttttttatgagaccatcaaagagagaaagagaataaaaatatttttgtaaaactttttttatgagaccatcaaagagagaaagagaataaaaatatttttgtaaaactttttttatgagaccatcaaagagagaaagagaataaaaatatttttgtaaaactttttttatgagaccatcagaaagaggtttaatatttttgtgatactctgaaaggaaataggaataggaataggaatagtgtcataatcgtatcacactattgagacagaaaaagaagaagtcgcgagaggtaactttttgtgaatgtagttaagaacatttttgttttgcaaaccggaatatagtgtccggtacacttttttaattcgtggtgtgcctgaatcgttcgattaaccctactcatccaatttcagatgaatagagttatcgattcagacacacgctttgagttttgttgaatcgatgagtgaagtatcatcggttgcaccttcagatgccgatccgtcgacatacttgaatccatccttgacctcaagttcagatgattccttgcacatgtctccgatacgaacgctaaactctagattcttgacgcattttgtatcgacgatcgttgaaccgatgatatcttcgtaactcactttcttatgagagatgttagacccgagtactggatgggtcttgatgtcgctgtctttctcttcttcgctacatctgatgtcgatagacacttcacagtctttgatcatagcaagagcttcttcatgagtgatcgcgggagagtccttaccttgtcctggggacacgctggacaatctagcattcactgtgtttccatcagcggattctgagatggatttaatctgaggacatttggtgaatccaaagttcattctcagacctccaccgatgatggagtaataagtggtaggaggatctacatcctcgactgatgtggaatcatcttctgattccacctcgggatctggatctgactcggactctgtaatttccgttacggattggcaaatcttatcattggtcggtgtttggtcttgctttgtgactttgataataacatcgattcccatatgatgtttgttttcttcttccgtacacgaggaggaggatgaggatgattgctgaagactggcaggcatagcagctgccgccaggcacatgcatgccaggacgatatattgtttcataattgctattgattgagtactgttctttatgattctacttccttaccgtgcaataaattagaatatattttctacttttacgagaaattaattattgtatttattatttatgggtgaaaaacttactataaaaagtgggtgggtttggaattagtgatcagtttatgtatatcgcaactaccgggcatatggctatcgacatcgagaacattacccacatgataagagattgtatcagtttcgtagtcttgagtattggtattactatatagtatatagatgtcgcccactagagttactgtctccgaatgcggcatgatagtatcattctttgctttcgttaactgtttggaggaagaatctttgttattgcatttaatctcgaaattcagagtgcacacctttctcctgtaaagaaacctgaagtcgctaccttattaagaacggagaagtatccatcacgaaatacgggattacagtctttatgattcatagtaatagttagttccgacgttgagatggattcgctgagaccggtagtggtcgtccgagtacacgacgtgtcgttaactggatacaggttaatttccacatcgatatagttaaacgtatttctgggtacgggttcgcatttatctgcggaagagacggtgtgagaatatgttccgagaccacacggagaacagatgacgtctccggatactccgtatcctattccacattttgtttgggaaacacatgccttgcatccggatgatcctttgagaagacaataatatccgggagagcattcacagattctattgtgagtcgtgttacacgatcgcgtcttccgttacaacttagacaagcgggtaaatgattattgcgagatgtgaaggtacccgaaccacacggcgtacatcgtgtgttagtcttgctatcgcataatctggaagcgtatgttcccggacacaaattatggcgtttgtattcgttgtctttacactttccatcggatggtgcatgcggtgctatatctcttccgtttattattatacatgagagaaacaatatatacgagtataatacggacttcatgatttaataatgtagtaatcgttgtcttgttcctgtttcctacttctccaatcatatagatattttctttctatcatggataatatttgtaatggttctttccgtacaacatactgtttagatgatattgcgcataatttccggaggcaaatacgatagtctagattgaccgatggtagactctaatttattgagtgctttgtcgacgagtttacttttacgctccatcgatagatggcactgttctatgagatcgtcgtacatgggaaatgaaatgtgactgtctgaatgtatggctttaagatagctgtgataccgtatacaggtcggtgtcggagattcgaatctctttgaggcgacttatgtcacgatgatggaatctatcttatcgaatgatatatttttcataaatacacttttatagtcctcgtttaaacagaatttactatgtagttccgcgaatgactcgtcccttaataggcagtaggctagtatcttttttacgtagtaatcgtcgtagggagagacatcttgtagaacaacgatttcgttttgttttctcttctgtaactgcttttctggatggccgtattgattatcgagcgtgatactcgctccatattccaataaccgctttgcaaattgtatattattgacatcgaccgcgtaatatagtagagttatcgatcatatctatatcatccatgtacttgcttagtatatcaaatacatctatcagtatggtttcataacagtgatacccgcaattattaaatctcgataatatcagaccgtacatacatagacggccattgttcgatacgtgatttacagccgcgtgtccatattttccacgataaaccttacgacgtttacatcgacgagattattattaacaaagtagtcgtgtagaggatagttgttgtccgttatctaacatgcatcgaacgaccatatcgccgtaatgtaagtagtttatcagtatggcttgtacgatggattcatcctgttgtctaaatctctttagaatgttatcgatgatgtagtggttatattctctggaatcgtacgaagtaatactacgcattacgtcgacaagagtatgacgtctctcaataagaagattaacgatttccatgtctacattatatggggttactctaaatcgcttgtttagataatacgcctctaatatagggctgacgtcgtatactctacacgtgtccacatcctttattaataataatttaacaatctctatatctatggttgagaaagaccagtagtattggatgggtaaagatcctccttcgtctctgccatggatggaaacattgttatcgatcaaacatttaattacatccttggatagagattgagattctctatgagacgatatatagtaatgaagagagttcttacacatatcactgtcgtacatacaggtacgaaatacgtaaccggtgctgtaacattctgatttaagaagccatagcaatacttctggtctcggattaggcgtcgttacgtatatatccaccaatccgagaccattgattgcataattcgtattcttggacggacgtatccgtttatccacaattaggtattttagcagacgtaagtcgatattatccgaatacagatcgaaatcatttatattcgacttgagttcgttagaggaatttgaatagctggatatcagtagatgcacaatctgagattttacgtatctatgcttactgtatactcctagcggagttaatccttcgttgtttctacaaagtctctcgactccgcgagagaacaatcttaatgtctgtatcgcatttattggagacgtaacaatgtagcgcattgtttcctcgtctatctatatgttttgataagttgtgacacgtttcaatttctagttttatttttttgtacgtcacatcttcatccagtagacgacatagaatagtgcactctctaccacaataatccatagctattctggtgctaattattcctatttcacgaaggcaatcattcctcataagatgataaaaagtgtagtggagatttagtatttagcagtgcggatatgatccaagagggtgagatagtcgttctcgttcagaatctttcgcagcataagtagtatgtcgatatacttatcgttgaagactctttataaaagtctatttgtttatatttattgcggatagcagtatttccctataaaaagtatacgtcctgtggtgtctttaatcatgtacatgaatggatggtttatgtagaccttcgtacgatataccatcgaaaagttaatcgtaaatactcctgtaacggccgatgcttctgtatactcctcattaacatctataaacgtcgtatgtagaaatttttctacagtgatagtttcattacacatcttgctaaaatctgcataatatccgaatatattagtaagtcctaaattttctaaaatcggtaccagattatacggttctgtcatttccactttaaactttggcatatacaagtctatacttttagtagataacataccacaccattttttaaatttttcatctgttatatttttttctatgttatatataccttctatgtcgtccggtagtataattaccatactagagtttccctcgtatggaatatcgataatagagaatcctccgaataattcattaatatgtacatattgcaagttattctcggtacccaccatcatatcaacgctggtaactatattcttagaaatataaaacttgtctgtatatgtaagatgtttagaaaatggatatttccacattgctttaaaatggacggcgctaacaactgtcatacgagtattaatggatagcggactagtcaataaggaattaattttaccatttgtcattgtcttaacccattcgttgattagttcctttgtttggttagcattattaaagtttacagtttgaaaatcgtcttttattttttgtaggaaggaggcgtggaactcgatactatcgctaccgtatattttatttgcggtagctagtgtcgcacaatacggaatatctacctccatgtcatcattattgtcatcgggtgtattctcattcatattctctatatattttgatagttgttcagctgtagaaccagctgctccatgatttagaatagataaagtagataaaatggaaactggagaaatcaaaacattttcatcagggtgttttaagattagttctttaaagatatccatggtatagacctaacgataacgatatatatcataaataaataatgttaaatttcaatttatgtttgtaccccgtattcatacttaacaaattggtattgcgtacacaatcaatcatattacataccattaataatgcaagcataaaaaattgttagtagatgtttctaaatataggttccgtaagcaaagaatataagaatgaagcggtaatgataaaatcaatcgttatctaaaatgatcatactcatttattttattctattatattaacacatacatttttaacagcaacacattcaatattgtattgttatttttatattatttacacaattaacaatatattattagtttatattactgaattaataatataaaattcccaatcttgtcataaacacacactgagaaacagcataaacacagaatccatcaaaaatgttgataaattatctgatgttgttgttcgctgctatgataatcagatcattcgccgatagtggtaacgctatcgaaacgacattgccagaaattacaaacgctacaacagatattccagctatcagattatgcggtccagagggagatggatattgtttacacggtgactgtatccacgctagagatattgacggtatgtattgtagatgctctcatggttatacaggcattagatgtcagcatgtagtattagtagactatcaacgttcagaaaacccaaacactacaacgtcatatatcccatctcccggtattatgcttgtattagtaggcattattatgtgttgtctattatctgtttataggttcactcgacgaactaaactacctatacaagatatggttgtgccataatttttataaatttttttatgagtatttttacaaaaatgtataaagtgtatgtcttatgtatatttataaaaatgctaagtatgcgatgtatctatgttatttgtatttatctaaacaatacctctacctctagatattatacaaaaattttttatttcggcatattaaagtaaaatctagttaccttgaaaatgaatacagtgggtggttccgtatcaccagtaagaacataatagtcaaatacagtatccgattgagattttgcatacaatactagtctagaaagaaatttgtaatcatcttctgtgacgggagtccatatatctgtatcatcgtctagtttatcagtgtcccatgctatattcctgttatcatcattagttaatgaaaataactctcgtgcttcagaaaagtcaaatattgtatccatacatacatctccaaaactatcgcttatacgtttatctttaacgatacctatacctagatggttatttactaacagacattttccagatctattgactataactcctatagtttccacatcaaccaagtaatgatcatctattgttatataacaataacataactcttttccatttttatcagtatgtatatctatatcaacgtcgtcgttgtagtgaatagtagtcattgatctattatatgaaacggatatgtctagaacggcaattgttttacgtccagttaacactttcgttgatttaaagtctagagtctttgcaaacataatatccttatccgactttatatttcctgtagggtggtataattttattttgcctccacatatcggtgtttccaaatatattactagacaatattccatatagttattagttaagggtacccaattagaacacgtacgcttattatcatcatttggatcgtatttcataaaagttattgtgttatcgatgtcaacacattctacattttttaatcgtctatatagtatttttctgatattttctataatatcagaattgtcttccatcggaagttgtatactatcggaatcagttacatgtttaaataattctctgatgtcattccttatacaatcaaattcattattaaacagtttaatagtctgtagacctttatcgtcgtaaatatccattgtcttattagttacgcttatttttatgtgtttttacgttgctttattatattttataagaatgattgtttgacgaatcacgagaactattaagacacattattaggtatatattataaaaaagtttttgattacgatgttataagaggaaagaggacacattaacatcatacatcaattaactacattcttataacatcgtaatcaaaagaattgcaattttgatgtataacaactgtcaatgggttatggaattgtatattacatattatacggtatgttggtaacgacaaataccggtcggtaattgtctgccggtgtaatagaattatatatatctatctattacaccggccttgtatacataataataagttgtggtagtatgatctccatatttataatttaggactttgtattcagtatttttggaatcataaaaaataaaaaaaagttttactaatttaaaatttaaaaagtatttacatttttttcactgtttagtcgcggatatggaattcgatcctgccaaaatcaatacatcatctatagatcatgtaacaatattacaatacatagatgaaccaaatgatataagactaacagtatgcattatccgaaatattatatcaatatcacaaaaataaatacacatttggctaatcaatttcgggcttggaaaaaacgtatcgccggaagggactatatgactaacttatctagagatacaggaatacaacaatcaaaacttactgaaactatacgtaactgtcaaaaaaatagaaacatatatggtctatatatacactacaatttagttattaattggataaccgatgtgattatcaatcaatattaagagggttggtaaattggtacatagctaataatacctatactccaaatacacccaataatacaacaaccatttctgagttggatatcatcaaaatactaaataaatacgaggacgtgtatagagtaagtaaagaaaaagaatgtggaatttgctatgaagttgtttactcaaaacgatagatactttggtttattggattcgtgtactcatatattttgcataacatgcatcaatatatggcatagaacacgaagagaaaccggtgcgtcggataattgtcctatatgccgtacccgttttagaaacataacaatgagcaagttctataagctagttaactaataaataaaaagtttaatttgttgacgacgtatgtcgttattttttctcgtataaaagattaatttgattctaatataatctttagtattggataaatatcaattcaaattaattccattagattatatcataaataaaaatagtagcacacaactacttcagcaaacattctttttataaatgccatctagcgtagcgaggacacaagtgaacctataattatcaaatttattagtatcagtcacatgaaggactttacgtagagtgacgattccactatctgtggtacgaacggtttcatcttctttgatgccatcacccagatgttctataaacttggtatcctcgtccgatttcatatcctttgccaaccaatacatatagctaaactcaggcatatgttccacacatcctgaacaatgaaattctccagaagatgttacaatgtctagatttggacatttggtttcaaccgcgttaacatatgagtgaacacacccatacatgaaagcgatgagaaataggattctcatcttgccaaaatatcactagaaaaaatttatttatcagttttaaaggtataaaaaatacttattgttgctcgaatattttgtatttgatggtatacggaagattagaaatgtaggtattatcatcaactgattctatggttttatgtattctatcatgtttcactattgcgttggaaataatatcatatgcttccacatatattttattttgttttaactcataatactcacgtaattctggattattggcatatctatgaataattttagctccatgatcagtaaatattaatgagaacatagtattaccacctaccattatttttttcatctcattcaattcttaattgcaaagatctatataatcattatagcgttgacttatggactctggaatcttagacgatgtacagtcatctataatcatggcatatttaatacattgttttatagcatagtcgttatctacgatgttagatatttctctcaatgaatcaatcacacaatctaatgtaggtttatgacataatagcattttcagcagttcaatgtttttagattcgttgatggcaatggctatacatgtatatccgttatttgatctaatgttgacatctgaaccggattctagcagtaaagatactagagattgtttattatatctaacagccttgtgaagaagtgtttctcctcgtttgtcaatcatgttaatgtctttaagataaggtaggcaaatgtttatagtactaagaattgggcaagcataagacatgtcacaaagacccttttttgtatgtataagtgtaaaaattataacatccatagttggatttacataggtgtccaatcgggatctctccatcatcgagataattgatggcatctcccttccttttttagtagatatttcatcgtgtaagaatcaatattaatatttctaaagtatccgtgtatagcctctttatttaccacagctccatattccactagagggatatcgccgaatgtcatatactcaattagtatatgttggaggacatccgagttcattgttttcaatatcaaagagatggtttccttatcatttctccatagtggtacaatactacacattattccgtgcggctttccattttccaaaaacaatttgaccaaatctaaatctacatctttattgtatctataatcactatttagataatcagccataattcctcgagtgcaacatgttagatcgtctatatatgaataagcagtgttatctattcctttcattaacaatttaacgatgtctatatctatatgagatgacttaatataatattgaagagctgtacaatagtttttatctataaaagacggcttgattccgtgattaattagacatttaacaacttccggacgcacatatgctctcgtatccgactctgaatacagatgagagatgatatacagatgcaatacggtaccgcaatttcgtagttgataatcatcatacgcgtatcagtactcgtcctcataaagaacactgcagccattttctatgaacaaatcaataattttagaaacaggatcattgtcattacataattttctataactgaacgatggttttcacatttaacactcaagtcaaatccatgttctaccaacacctttatcaagtcaacgtctacatttttggatttcatatagctgaatatattaaagttatttatgttgctaaatccagtggcttctagtagagccatcgctatatccttattaactttaacatgtctactatttgtgtattcttctaatggggtaagctgtctccaatttttgcgtaatggattagtgccactgtctagtagtagtttgacgacctcgacattattacaatgctcattaaaaaggtatgcgtgtaaagcattattcttgaattggttcctggtatcattaggatctctgtctttcaacatctgtttaagttcatcaagagccacctcctcattttccaaatagtcaaacattttgactgaatgagctactgtgaactctatacacccacacaactaatgtcattaaatatcatgtcaaaaacttgtacaattattaataaaaataatttagtgtttaaattttaccagttccagattttacacctccgttaatacctccattaaccccactggacgatcctcctccccacattccaccgccaccagatgtataagttttagatcctttattactaccatcatgtccatggataaagacactccacatgccgccactaccccctttagaagacatattaataagacttaaggacaagtttaacaataaaattaatcacgagtaccctactaccaacctacactattatatgattatagtttctatttttacagtaccttgactaaagtttctagtcacaagagcaatactaccaacctacactattatatgattatagtttctatttttataggaacgcgtacgagaaaatcaaatgtctaatttctaacggtagtgttgataaacgattgttatccgcggatacctcctctatcatgtcgtctattttcttactttgttctattaacttattagcattatatattatttgattataaaacttatattgcttattagcccaatctgtaaatatcggattattaacatatcgtttctttgtaggtttatttaacatgtacatcactgtaagcatgtccttaccatttattttaatttgacgcatatccgcaatttctttttcgcagtcggttataaattctatatatgatggatacatgctacatgtgtacttataatcgactaatatgaagtacttgatacatattttcagtaacgatttattattaccacctatgaataagtacctgtgatcgtctaggtaatcaactgttttcttaatacattcgatggttggtaatttactcagaataatttccaatatcttaatatataattctgctatttctgggatatatttatctgccagtataacacaaatagtaatacatgtaaacccatattttgttattatattaatgtctgcgccattatctattaaccattctactaggctgacactatgcgactcaatacaatgataaagtatactacatccatgtttatctattttgtttatatcatcaatatacggcttacaaagttttagtatcgataacacatccaactcacgcatagagaaggtagggaataatggcataatatttattaggttatcatcattgtcattatctacaactaagtttccattttttaaaatatactcgacaactttaggatctctattgccaaatttttgaaaatatttatttatatgcttaaatctatataatgtagctccttcatcaatcatacatttaataacattgatgtatactgtatgataagatacatattctaacaatagatcttgtatagaatctgtatatcttttaagaattgtggatattaggatattattacataaactattacacaattctaaaatataaaacgtatcacggtcgaataatagttgatcaactatataattatcgattttgtgatttttcttcctaaactgtttacgtaaatagttagatagaatattcattagttcatgaccactatagttactatcgaataacgcgtcaaatatttcccgtttaatatcgcatttgtcaagataataatagagtgtggtatgttcacgataagtataataacgcatctctttttcgtgtgaaattaaatagtttattacgtccaaagatgtagcataaccatcttgtgacctagtaataatataataatagagaactgttttacccattctatcatcataatcagtggtgtagtcgtaatcgtaatcgtctaattcatcatcccaattataatattcaccagcacgtctaatctgttctattttgatcttgtatccatactgtatgttgctacatgtaggtattcctttatccaataatagtttaaacacatctacattgggatttgatgttgtagcgtatttttctacaatattaataccatttttgatactatttatttctatacctttcgaaattagtaatttcaataagtctatattgatgttatcagaacatagatattcgaatatatcaaaatcattgatatttttatagtcgactgacgacaataacaaaatcacaacatcgtttttgatattattatttttcttggtaacgtatgcctttaatggagtttcaccatcatactcatataatggatttgcaccactttctatcaatgattgtgcactgctggcatcgatgttaaatgttttacaactatcatagagtatcttatcgttaaccatgattggttgttgatgctatcgcattttttggtttctttcatttcagttatgtatggatttagcacgtttgggaagcatgagctcatatgatttcagtactgtagtgtcagtactattagtttcaataagatcaatctctagatctatagaatcaaaacacgataggtcagaagataatgaatatctgtaggcttcttgttgtactgtaacttctggttttgttagatggttgcatcgtgctttaacgtcaatggtacaaattttatcctcgctttgtgtatcatattcgtccctactataaaattgtatattcagattatcatgcgatgtgtatacgctaacggtatcaataaacggagcacaccatttagtcataaccgtaatccaaaaatttttaaagtatatcttaacgaaagaagttgtgtcattgtctacggtgtatggtactagatcctcataagtgtatatatctagagtaatgtttaatttattaaatggttgataatatggatcctcgtgacaatttccgaagatggaaataagacataaacacgcaataaatctaattgcggacatggttactccttaaaaaaatacgaataatcaccttggctatttagtaagtgtcatttaacactatactcatattaatccatggactcataatctctatacgggattaacggatgttctatatacggggatgagtagttctcttctttaactttatactttttactaatcatatttagactgatgtatgggtaatagtgtttgaagagctcgttctcatcatcagaataaatcaatatctctgtttttttgttatacagatgtattacagcctcatatattacgtaatagaacgtgtcatctaccttattaactttcaccgcatagttgtttgcaaatacggttaatcctttgacctcgtcgatttccgaccaatctgggcgtataatgaatctaaactttaattgcttgtaatcattcgaaataatttttagtttgcatccgtagttatcccctttatgtaactgtaaatttctcaacgcgatatctccattaataatgatgtcgaattcgtgctgtatacccatactgaatggatgaacgaataccgacggcgttaatagtaatttactttttcatctttacatattgggtactagttttactatcataagtttataaattccacaagctactatggaataagccaaccatcttagtataccacacatgtcttaaagtttattaattaattacatgttgttttatatatatcgctacgaatttaaagagaaattagtttaggaagaaaaattatctatctacatcatcacgtctctgtattctacgatagagtgctactttaagatgcgacagatccgtgtcatcaaatatatactccattaaaatgattattccggcagcgaacttgatattggatatatcacaacctttgttaatatctacgacaatagacagcagtcccatggttccataaacagtgagtttatctttctttgaagagatattttgtagagatcttataaaactgtcgaatgacatcgcatttatatctttagctaaatcgtatatgttaccatcgtaatatctaaccgcgtctatcttaaacgtttccatcgctttaaagacgtttccgatagatggtctcatttcatcagtcatactgagccaacaaatataatcgtgtataacatctttgatagaatcagactctaaagaaaacgaatcggctttattatacgcattcatgataaacttaatgaaaaatgtttttcgttgtttaagttggatgaatagtatgtcttaataattgttattatttcattaattaatatttagtaacgagtacactctataaaaacgagaatgacataactaatcataactagttatcaaagtgtctaggacgcgtaattttcatatggtatagatcctgtaagcattgtctgtattctggagctattttctctatcgcattagtgagttcagaatatgttataaatttaaatcgaataacgaacataactttagtaaagtcgtctatattaactcttttattttctagccatcgtaataccatgtttaagatagtatattctctagttactacgatctcatcgttgtctagaatatcacatactgaatctacatccaattttagaaattggtctgtgttacatatctcttctatattattgttgatgtattgtcgtagaaaactattacgtagaccattttctttataaaacgaatatatagtactccaattatctttaccgatatatttgcacacataatccattctctcaatcactacatctttaagattttcgttgttaagatatttggctaaactatataattctattagatcatcaacagaatcagtatatatttttctagatccaaagacgaactctttggcgtcctctataatattcccagaaaagatattttcgtgttttagtttatcgagatctgatctgttcatatacgccatgattgtacggtacgttatgataaccgcataaaataaaaatccattttcatttttaaccaatactattcataattgagattgatgtaatactttgttactttgaacgtaaagacagtacacggatccgtatctccaacaagcacgtagtaatcaaatttggtgttgttaaacttcgcaatattcatcaatttagatagaaacttatactcatcatctgttttaggaatccatgtattattaccactttccaacttatcattatcccaggctatgtttcgtccatcatcgttgcgcagagtgaataattcttttgtattcggtagttcaaatatatgatccatgcatagatcggcaaagctattgtagatgtgatttttcctaaatctaatataaaactcgtttactagcaaacactttcctgatttatcgaccaagacacatatggtttctaaatctatcaagtggtggggatccatagttatgacgcagtaacatatattattacattcttgactgtcgctaatatctaaatatttattgttatcgtattggattctgcatatagatggcttgtatgtcaaagatatagaacacataaccaatttatagtcgcgctttacattctcgaatctaaagttaagagatttagaaaacattatatcctcggatgatgttatcactgtttctggagtaggatatattaaagtctttacagatttcgtccgattcaaataaatcactaaataatatcccacattatcatctgttagagtagtatcattaaatctattatattttatgaaagatatatcactgctcacctctatatttcgtacatttttaaactgtttgtataatatctctctgatacaatcagatatatctattgtgtcggtagacgataccgttacatttgaattaatggtgttccattttacaacttttaacaagttgaccaattcatttctaatagtatcaaactctccatgattaaatattttaatagtatccattttatatcactacggacacaaagtagctgacataaaccattgtataatttttatgttttatgtttattagcgtacacattttggaagttccggcttccatgtatttcctggagagcaagtagatgatgaggaaccagatagtttatatccgtacttgcacttaaagtctacattgtcgttgtatgagtatgatcttttaaacccgctagacaagtatccgtttgatattgtaggatgtggacatttaacaatctgacacgtgggtggatcggaccattctcctcctgaacacaggacactagagttaccaatcaacgaatatccactattgcaactataagttacaacgctcccatcggtataaaaatcctcgtatccgttatgtcttccgttggatatagatggaggggattggcatttaacagattcacaaataggtgcctcgggattccataccatagatccagtagatcctaattcacaatacgatttagattcaccgatcaactgatatccgctattacaagagtacgttatactagagccaaagtctactccaccaatatcaagttggccattatcgatatctcgaggcgatgggcatctccgtttaatacattgattaaagagtgtccatccagtacctgtacatttagcatatataggtcccattttttgctttctgtatccaggtagacatagatattctatagtgtctcctatgttgtaattagcattagcatcagtctccacactattcttaaatttcatattaatgggtcgtgacggaatagtacagcatgatagaacgcatcctattcccaacaatgtcaggaacgtcacgctctccaccttcatatttatttatccgtaaaaatgttatcctggacatcgtacaaataataaaaagcccatatatgttcgctattgtagaaattgtttttcacagttgctcaaaaacgatggcagtgacttatgagttacgttacactttggagtctcatctttagtaaacatatcataatattcgatattacgagttgacatatcgaacaaattccaagtatttgattttggataatattcgtattttgcatctgctataattaagatataatcaccgcaagaacacacgaacatctttcctacatggttaaagtacatgtacaattctatccatttgtcttccttaactatatatttgtatagataattacgagtctcgtgagtaattccagtaattacatagatgtcgccgtcgtactctacagcataaactatactatgatgtctaggcatgggagacttttttatccaacgatttttagtgaaacattccacatcgtttaatactacatatttctcatacgtggtataaactccacccattacatatatatcatcgtttacgaataccgacgcgcctgaatatctaggagtaattaagtttggaagtcttatccatttcgaagtgccgtgtttcaaatattctgccacacccgttgaaatagaaaattctaatcctcctattacatataactttccatcgttaacacaagtactaacttctgattttaacgacgacatattagtaaccgttttccattttttcgttttaagatctacccgcgatacggaataaacatgtctattgttaatcatgccgccaataatgtatagacaattatgtaaaacatttgcattatagaattgtctatctgtattaccgactatcgtccaatattctgttctaggagagtaatgggttattgtggatatataatcagagtttttaatgactactatattatgttttataccatttcgtgtcactggctttgtagatttggatatagttaatcccaacaatgatatagcattgcgcatagtattagtcataaacttgggatgtaaaatgttgatgatatctacatcgtttggatttttatgtatccactttaataatatcatagctgtaacatcctcatgatttacgttaacgtcttcgtgggataagatagttgtcagttcatcctttgataattttccaaattctggatcggatgtcaccgcagtaatattgttgattatttctgacatcgacgcattatatagttttttaattccatatcttttagaaaagttaaacatccttatacaatttgtgaaattaatattatgaatcatagtttttacacatagatctactacaggcggaacatcaattattatggcagcaactagtatcatttctacattgtttatggtgatgtttatcttcttccagcgcatatagtctaatagcgattcaaacgcgtgatagtttataccattcaatataatcgcttcatcctttagatggtgatcctgaatgcgtttaaaaaaattatacggagacgccgtaataatttccttattcacttgtataatttccccattgatagaaaatattacgctttccattcttaaagtactataagtaattatagtataatgtaaacgtttatatattcaatatttttataaaaatcattttgacattaattcctttttaaatttccgtctatcatctatagaaacgtattctatgaatttataaaatgcttttacgtgtcctatcgtaggcgatagaaccgctaaaaagcctatcgaatttctacaaaagaatctgttatatggtatagggagagtataaaacattaaatgtccgtacttattaaagtattcagtagccaatcctaactctttcgaatacttattaatggctcttgttctgtacgaatctatttttttgaacaacggacctagtggtatatcttgttctatgtatctaaaataatgtctgactagatccgttagtttaatatccgcagtcatcttgtctagaatggcaaatctaactgcgggtttaggctttagtttagtttctatatctacatctatgtctttatctaacaccaaaaatataatagctaatattttattacaatcatccggatattcttctacgatctcactaactaatgtttctttggttatactagtatagtcactatcggacaaataaagaaaatcagatgatcgatgaataatacatttaaattcatcatctgtaagatttttgagatgtctcattagaatattattagggttagtactcattatcattcggcagctattacttattttattatttttcaccatatagatcaatcattagatcatcaaaatatgtttcaatcatcctaaagagtatggtgaatgactcttcccatctaatttctgaacgttcaccaatgtctctagccactttggcactaatagcgatcattcgcttagcgtcttctatattattaactggttgatttaatctatctagcaatggaccgtcggacagcgtcattctcatgttcttaatcaatgtacatacatcgccgtcatctaccaattcatccaacaacataagctttttaaaatcatcattataataggtttgatcgttgtcatttctccaaagaatatatctaataagtagagtcctcatgcttagttaacaactattttttatgttaaatcaattagtacaccgctatgtttaatacttattcatattttagtttttaggattgagaatcaatacaaaaattaatgcatcattaattttagaaatacttagtttccacgtagtcaatgaaacatttgaactcatcgtacaggacgttctcgtacaggacgtaactataaaccggtttatatttgttcaagatagatacaaatccgataactttttttacgaattctacgggatccactttaaaagtgtcataccgggttctttttatttttttaaacagatcaatggtgtgatgttgattaggtcttttacgaatttgatatagaatagcgtttacatattctccataatggtcaatcgccatttgttcgtatgtcataaattctttaattatatgacactgtgtattatttagttcatccttgttcattgttaggaatctatccaaaatggcaattatactagaactataggtgcgttgtatacacatattgatgtgtctgtttatacaatccatgatatttggatccatgctactaccttcgggtaaaattgtagcatcatataccatttctagtactttaggttcattattatccattgcagaggacgtcatgatcgaatcataaaaaaatatattatttttatgttattttgttaaaaataatcatcgaatacttcgtaagatactccttcatgaacataatcagttacaaaacgtttatatgaagtaaagtatctacgatttttacaaaagtccggatgcataagtacaaagtacgcgataaacggaataataatagatttatctagtctatctttttctatagctttcatagttagatacatggtctcagaagtaggattatgtaacatcagcttcgataaaatgactgggttatttagtcttacacattcgctcatacatgtatgaccgttaactacagagtctacactaaaatgattgaacaatagatagtctaccattgtttcgtattcagatagtacagcgtagtacatggcatcttcacaaattatatcattgtctaatagatatttgacgcatcttatggatcccacttcaacagccatcttaaaatcatattgctttcctttatcattaataatttctagaacatcatctctatcataaaagatacaaatattaactgtttgatccgtaataacattgctagtcaatagcaatttgttaataagatgcgctgggctcaatgtcttaataagaagtgtaagaggactatctccgaatttgttttgtttattaacatccgttgatggaagtaaaagatctataatgtctacattcttgactgttttagagcatacaatatggagaggtgtatttccatcatgatctggttttgagggactaattcctagtttcatcatccatgagattgtagaagcttttggattgtctgacataagatgtctatgaatatgatttttgccaaatttatccactatcctggcttcgaatccgatggacattatttttttaaacactctttctgaaggatctgtacacgccaacaacggaccacatccttcttcatcaaccgagttgttaatcttggctccatactgtaccaataaatttattctctctatgacttcatcatctgttcccgagagataatatagaggtgttttatgctgtttatcacacgcgtttggatctgcgccgtgcgtcagcagcatcgcgactattctattattattaattttagaagctatatgcaatggataatttccatcatcatccgtctcatttggagagtatcctctatgaagaagttcttcgacaaatcgttcatctagtcctttaattccacaatacgcatgtagaatgtgataattatttccagaaggttcgatagcttgtagcatattcctaaatacatctaaatttttactattatatttggcataaagagatagataatactcggccgacataatgttgtccattgtagtataaaaattaatatttctatttctatttctgtatatttgcaacaatttactctctataacaaatatcataacttagtttttttatgtcaagaaggcactggtttagttcatctataaatgtcacgccataactaccacgcatgccatactcagaattatgataaagatatttatccttggggtgtaggtaatggggattaatctttgttggatcagtctctaagttaacacatgtcacacatgatccatttatagttatatcacacgatgatgatttatgaattgattccggaagatcgctatcgtattttgtggttccacaattcatttccatacatgttattgtcacactaatattatgatgaactttatctagccgctgagtggtaaacaacagaacagatagtttattatctttaccaacaccctcagccgctgccacaaatctctgatccgtatccatgatggtcatgtttatttctagtccgtatccagtcaacactatgttagcatttctgtcgatatagctttcactcatatgacactcaccaataatagtagaattaatgtcgtaatttacaccaatagtgagttcggcggcaaagtaccaataccggtaatcttgtcgaggaggacatatagtattcttgtattctaccgaatacccgagagatgcgatacaaaagagcaagactaatttgtaaaccatcttactcaaaatatgtaacaatagtacgatgcaatgagtaagacaataggaaatctatcttatatacacataattattctatcaattttaccaattagttagtgtaatgttaacaaaaatgtgggagaatctaattagtttttctttacacaattgacgtacatgagtctgagttccttgtttttgctaattatttcatccaatttattattcttgacgatatcgagatcttttgtataggagtcaaacttgtattcaacatgcttttctataatcattttagctatttcggcatcatccaatagtacattttccagattagcagaatagatattaatgtcgtatttgaacagagcctgtaacatctcaatgtctttattatctatagccaatttaatgtccggaatgaagagaagggaattattggtgtttgtcgacgtcatatagtcgagcaagagaatcatcatatccacgtgtccattttttatagtgatgtgaatacaactaaggagaatagccagatcaaaagtagatggtatctctgaaagaaagtaggaaacaatacttacatcattaagcatgacggcatgataaaatgaagttttccatccagttttcccatagaacatcagtctccaatttttcttaacaaacagttttaccgtttgcatgttaccactatcaaccgcataatacaatgcggtgtttcccttgtcatcaaattgtgaatcatccagtccactgaatagcaaaatctttactattttggtatcttccaatgtggctgcctgatgtaatggaaattcattctctagaagatttttcaatgctccagcgttcaacaacgtacatactagacgcacgttattatcagctattgcataatacaaggcactatgtccatggacatccgccttaaatgtatctttactagagagaaagcttttcagctgcttagacttccaagtattaattcgtgacagatccatgtctgaaacgagacgctaattagtgtatattttttcattttttataattttgtcatattgcaccagaattaataatatctttaatagatctgattagtagatacatggctatcgcaaaacaacatatacacatttaataaaaataatatttattaagaaaattcagatttcacgtacccatcaatataaataaaataatgattccttacaccgtacccatattaaggagattccaccttacccataaacaatataaatccagtaatatcatgtctgatgatgaacacaaatggtgtattaaattccagtttttcaggagatgatctcgccgtagctaccataatagtagatgcctctgctacagttccttgttcgtcgacatctatctttgcattctgaaacattttataaatatataatgggtccctagtcatatgtttaaacgacgcattatctggattaaacatactaggagccatcatttcggctatcgacttaatatccctcttattttcgatagaaaatttagggagtttaagattgtacactttattccctaattgagacgaccaatagtctaattttgcagccgtgatagaatctgtgaaatgggtcatattatcacctattgccaggtacatactaatattagcatccttatacggaaggcgtaccatgtcatattctttgtcatcgattgtgattgtatttccttgcaatttagtaactacgttcatcatgggaaccgttttcgtaccgtacttattagtaaaactagcattgcgtgttttagtgatatcaaacggatattgccatatacctttaaaatatatagtattaatgattgcccatagagtattattgtcgagcatattagaatctactacattagacataccggatctacgttctactatagaattaattttattaaccgcatctcgtctaaagtttaatctatataggccgaatctatgatattgttgataatacgacggtttaatgcacacagtattatctacgaaactttgataagttagatcagtgtacgtatatttagatgttttcagcttagctaatcctgatattaattctgtaaatgctggacccagatctctttttctcaaatccatagtcttcaataattctattctagtattacctgatgcaggcaatagcgacataaacatagaaaacgaataaccaaacggtgagaagacaatattatcatcttgaatatttttatacgctactataccggcattggtaaatccttgtagacgataggcggacgctgaacacgctaacgatagtatcaataacgcaatcatgattttatggtattaataattaaccttatttttatgttcggtataaaaaaattattgatgtctacacatccttttgtaattgacatctatatatccttttgtataatcaactctaatcactttaacttttacagttttccctaccagtttatccctatattcaacatatctatccatatgcatcttaacactctctgccaagatagcttcagagtgaggatagtcaaaaagataaatatatagagcataatcattctcgtatactctgccctttattacatcacccgcattgggcaacgaataacaaaatgcaagcatcttgttaacgggctcgtaaattgggataaaaattatgtttttattgtcttatatctattttattcaagagaatattcaggaatttctttttccggttgtatctcgtcgcagtatatatcatttgtacattgtttcatattttttaatagtttacaccttttagtaggactagtatcgtacaattcatagctgtattttgaattccaatcacgcataaaaatatcttccaattgttgacgaagacctaatccatcatccggtgtaatattaatagatgctccacatgtatccgtaaagtaatttcctgtccaatttgaggtacctatataggccgttttatcggttaccatatatttggcatggtttaccctagaatacggaatgggaggatcagcatctggtacaataaatagctttacttctatatttatgtttttagattttagcatagcgatagatcttaaaaagtttctcatgataaacgaagatcgttgccagcaactaatcaatagcttaacggatacttgtctgtctatagcggatcttcttaattcatcttctatataaggccaaaacaaaattttacccgccttcgaataaataatagggataaagttcataacagatacataaacgaatttactcgcatttctaatacatgacaataaagcggttaaatcattggttctttccatagtacatagttgttgcggtgcagaagcaataaatacagagtgtggaacgccgcttacgttaatactaagaggatgatctgtattataatacgacggataaaagtttttccaattatatggtagattgttaactccaagataccagtatacctcaaaaatttgagtgagatccgctgccaagttcctattattgaagatcgcaatacccaattccttgacctgagttagtgatctccaatccatgttagcgcttcctaaataaatatgtgtattatcagatatccaaaattttgtatgaagaactcctcctaggatatttgtaatatctatgtatcgtacttcaactccggccatttgtagtctttcaacatcctttaatggtttgttagatttattaacggctactctaactcgtactcctcttttgggtaattgtacaatctcgtttaatattatcgtgccgaaattcgtacccacttcatccgataaactccaataaaaagatgatatatctagtgtttttgtggtattggatagaatttccctccacatgttaaatgtagacaaatatactttatcaaattgcatacctataggaatagtttctgtaatcactgcgattgtattatccggattcattttatttgttaaaagaataatcctatatcacttcactctattaaaaatccaagtttctatttctttcatgactgattttttaacttcatccgtttccttatgaagatgatgtttggcaccttcataaatttttatttctctattacaatttgcatgttgcatgaaataatatgcacctaaaacatcgctaatcttattgtttgttccctggagtatgagagtcggggggtgttaatcttggaaattatttttctaaccttgttggtagccttcaagacctgactagcaaatccagccttaattttttcatgattgactaatgggtcgtattggtatttataaactttatccatatctctagatactgattctggacatagctttccgactggcgcatttggtgtgatggttcccataagtttggcagctagcagattcagtcttgaaacagcatctgcattaactagaggagacattagaatcattgctgtaaacaagtttggattatcgtaagaggctagctcccatggaatgacccaataagtagatttaatagttaccacgtgctgtaccaaagtcatcaatcatcattttttcaccattacttcttccatgtccaatatgatcatgtgagaatactaaaattcctaacgatgatatgttttcagctagttcgtcataacgtccagaatgtttaccagctccatgacttatgaatactaatgccttaggatatgtaataggtttccaatatttacaatatatgtaatcattgtccagattgaacatacagtttgcactcatgattcacgttatataactatcaatattaacagttcgtttgatgatcatattatttttatgttttattgataattgtaaaaacatacaattaaatcaatatagaggaaggagacggctactgtcttttgtaagatagtcatggcgactaaattagattatgaggatgctgttttttactttgtggatgatgataaaatatgtagtcgcgactccatcatcgatctaatagatgaatatattacgtggagaaatcatgttatagtgtttaacaaagatattaccagttgtggaagactgtacaaggaattgatgaagttcgatgatgtcgctatacggtactatggtattgataaaattaatgagattgtcgaagctatgagcgaaggagaccactacatcaattttacaaaagtccatgatcaggaaagtttattcgctaccataggaatatgtgctaaaatcactgaacattggggatacaaaaagatttcagaatctagattccaatcattgggaaacattacagatttgatgaccgacgataatataaacatcttgatactttttctagaaaaaaaattgaattgatgatataggggtcttcataacgcataattattacgttagcattctatatccgtgttaaaaaaaattatcctatcatgtatttgagagttttatatgtagcaaacatgatagctgtgatgccaataagctttagatattcacgcgtgctagtgttagggatggtattatctggtggtgaaatgtccgttatataatctacaaaacaatcatcgcatatagtatgcgatagtagagtaaacatttttatagtttttactggattcatacatcgtctacccaattcggttataaatgaaattgtcgccaatcttacacccaaccccttgttatccattagcatagtattaacttcgttatttatgtcataaactgtaaatgattttgtagatgccatatcatacatgatattcatgtccctattataatcattactaactttatcacaatatatgttgataatatctatatatgatctagtctttgtgggcaactgtctatacaagtcgtctaaacgttgtttactcatatagtatcgaacagccatcattacatggtcccgttccgttgatagataatcgagtatgttagtggacttgtcaaatctatataccatattttctggaagtggatatacatagtcgtgatcaacattattgctagcctcatcttctatatcctgtactataccattatctatatcatctacataatctatgatattattacacataaacatcgacaacatactattgtttattatctaagtcctgttgatccaaacccttgatctcctctatttgtactatctagagattgtacttcttccagttctggataatatatacgttgatagattagctgagctattctatctccagtatttacattaaacgtacattttccattattaataagaatgactcctatgtttcccctataatcttcgtctattacaccacctcctatatcaatgccttttagtgacagaccagacctaggagctattctaccatagcagaacttaggcatggacatactaatatctgtcttaattaactgtctttctcctggagggatagtataatcgtaagcgctatacaaatcatatccggcagcacccggcgattgcctagtaggagatttagctctgttagtttccttaacaaatctaactggtgagttaatattcatgttgaacataaaactaatattttatttcaaaattatttaccatcccatatattccatgaataagtgtgatgattgtacacttctatagtatctatatacgatccacgataaaatcctcctatcaatagcagtttattatccactatgatcaattctggattatccctcggataaataggatcatctatcagagtccatgtattgctggattcacaataaaattccgcatttctaccaaccaagaataaccttctaccgaacactaacgcgcatgatttataatgaggataataagtggatggtccaaactgccactgatcatgattgggtagcaaatattctgtagttgtatcagtttcagaatgtcctcccattacgtatataacattgtttatggatgccactgctggattacatctaggtttcagaagactcggcatattaacccaagcagcatccccgtggaaccaacgctcaacagatgtgggatttggtagacctcctactacgtataatttattgttagcgggtatcccgctagcatacagtctggggctattcatcggaggaattggaatccaattgtttgatatataatttacagctatagcattgttatgtatttcattgttcatccatccaccgatgagatatactacttctccaacatgagtacttgtacacatatggaatatatctataatttgatccatgttcataggatactctatgaatggatacttgtatgatttgcgtggttgtttatcacaatgaaatattttggtacagtctagtatccattttacattatttatacctctgggagaaagataatttgacctgattacatttttgataaggagtagcagatttcctaatttatttcttcgcctcatataccacttaatgacaaaatcaactacataatcctcatctggaacatttagttcatcgctttctagaataagtttcatagatagataatcaaaattgtctatgatgtcatcttccagttccaaaaagtgtttggcaataaagtttttagtatgacataagagattggatagtccgtattctatacccatcatgtaacactcgacacaatattcctttctaaaatctcgtaagataaagtttatacaagtgtagatgataaattctacagaggttaatatagaagcacgtaataaattgacgacgttatgactatctatatatacctttccagtatatgagtaaataactatagaagttaaactgtgaatgtcaaggtctagacaaacccttgtaactggatctttatttttcgtgtatttttgacgtaaatgtgtgcgaaagtaaggagataactttttcaatatcgtagaattgactattatattgcctcctatggcatcaataattgttttgaatttcttagtcatagacaatgctaatatattcttacagtacacagtattgacaaatatcggcatttatgtttctttaaaagtcaacatctagagaaaaatgattatctttttgagacataactcccattttttggtattcacccacacgtttttcgaaaaaattagtttttccttccaatgatatattttccatgaaatcaaacggattggtaacattataaatttttttaaatcccaattcagaaatcaatctatccgcgacgaattctatatatgttttcatcatttcacaattcattcctataagtttaactggaagagccgcagtaagaaattcttgttcaatggatactgcatctgttataatagatctaacggtttcttcactcggtggatgcaataaatgtttaaacatcaaacatgcgaaatcgcagtgcagaccctcgtctctactaattagttcgttggaaaacgtgagtccgggcattaggccacgctttttaagccaaaatatggaagcgaatgatccagaaaagaaaattccttctactgcagcaaaggcaataagtctctctccataaccggcgctgtcatgtatccacttttgagcccaatcggccttcttttttacacaaggcatcgtttctatggcattaaagagatagtttttttcattactatctttaacataagtatcgatcaaaagactatacatttccgaatgaatgttttcaatggccatctgaaatccgtagaaacatctagcctcggtaatctgtacttctgtacaaaatcgttccgccaaattttcattcactattccgtcactggctgcaaaaaacgccaatacatgttttataaaatatttttcgtctggtgttagtttattccaatcattgatatctttagatatatctacttcttccactgtccaaaatgatgcctctgcctttttatacatgttccagatgtcatgatattggattgggaaaataacaaatctatttggatttggtgcaaggatgggttccataactaaattaacaataacaataaattttttttcagttatctatatgcctgtacttggattttttgtacatcgatatcgccgcaatcactacaataattacaagtattattgatagcattgttattagtactatcataattaaattatctacattcatgggtgctgaataatcgttattatcatcattatcattttgtaattgtgacatcatactagataaatcgtttgcgagattgttgtgggaagcgggcatggaggatgcattatcattattatttaacgccttccatttggattcacaaatgttacgcacattcaacattttatggaaactataattttgtgaaaacaaataacaagaaaactcgtcatcgttcaaatttttaacgatagtaaaccgattaaacgtcgagctaatttctaacgctagcgactctgttggatatgggtttccagatatatatcttttcagttcccctacgtatctataatcatctgtaggaaatggaagatatttccatttatctactgttcctaatatcatatgtggtggtgtagtagaaccattaagcgcgaaagatgttatttcgcatcgtattttaacttcgcaataatttctggttagataacgcactctaccagtcaagtcaatgatattagcctttacagatatattcatagtagtcgtaacgatgactccatcttttagatgcgatactcctttgtatgtaccagaatcttcgtacctcaaactcgatatatttaaacaagttaatgagatattaacgcgttttatgaatgatgatatataaccagaagttttatcctcggtggctagcgctataaccttatcattataataccaactagtgtgattaatatgtgacacgtcagtgtgggtacaaatatgtacattatcgtctacgtcgtattcgatacatccgcatacagccaacaaatataaaatgacaaatactctaacgccgttcgtacccatcttgatgcggtttaataaatgttttgatttcaatttattgtaaaaaaagattcggttttatactgttcgatattctcattgcttatattttcatctatcatctccacacagtcaaatccgtggttagcatgcacctcatcaaccggtaaaagactatcggactcttctatcattataactctagaatatttaatttggtcattattaatcaagtcaattatcttatttttaacaaacgtgagtattttactcattttttataaaaacttttagaaatatacagactctatcgtgtgtctatatcttctttttatatccaatgtatttatgtctgatttttcttcatttatcatatataatggtccaaattctacacgtgcttcggattcatccagatcattaaggttcttataattgtaacatccttctcttccctcttctacatcttccttcttattcttattcttagcgtcacagaatctaccacagcaggatcccatgacgagcgtcatattaaactaatccattttcaattataatatatgattagtaatgaccattaaaataaaaaatattcttcataaccggcaagaaagtgaaaagttcacattgaaactatgtcagtagtatacatcatgaaatgatgatatatatatactctattttggtggaggattatatgatataattcgtggataatcatttttaagacacatttctttattcgtaaatcttttcacgttaaatgagtgtccatattttgcaatttcttcatatgatggcggtgtacgtggacgaggctgctcctgttcttgttgtggtcgccgactgtcgtgtctgcgtttagatccctccattatcgcgattgcgtagatggagtactattttataccttgtaattaaatttttttattaattaaacgtataaaaacgttccgtatctgtatttaagagccagatttcgtctaatagaacaaatagctacagtaaaaataactagaataattgctacacccactagaaaccacggatcgtaatacggcaatcggttttcgataataggtggaacgtatattttatttaaggacttaacaattgtctgtaaaccacaatttgcttccgcggatcctgtattaactatctgtaaaagcatatgttgaccgggcggagccgaacattctccgatatctaatttctgtatatctataatattattaacctccgcatacgcattacagttcttttctagcttggataccgcactaggtacatcgtctagatctattcctatttcctcagcgatagctcttctatccttttccggaagcaatgaaatcacttcaataaatgattcaaccatgagtgtgaaactaagtcgagaattactcatgcatttgttagttattcggagcgcgcaatttttaaactgtcctataacctctcctatatgaatagcacaagtgacattagtagggatagaatgttgagctaatttttgtaaataactatctataaaaagattatacaaagttttaaactctttagtttccgccatttatccagtctgagaaaatgtctctcataataaatttttccaagaaactaattgggtgaagaatggaaacctttaatctatatttatcacagtctgttttggtacacatgatgaattcttccaatgccgtactaaattcgatatctttttcgatttctggatatgtttttaataaagtatgaacaaagaaatggaaatcgtaataccagttatgtttaactttgaaattgttttttattttcttgttaatgattccagccacttgggaaaagtcaaagtcgtttaatgccgatttaatacgttcattaaaaacaaactttttatcctttagatgaattattattggttcattggaatcaaaaagtaagatattatcgggtttaagatctgcgtgtaaaaagttgtcgcaacagggtagttcgtagattttaatgtataacagagccatctgtaaaaagataaactttatgtattgtaccaaagatttaaatcctaatttgatagctaactcggtatctactttatctgccgaatacagtgctaggggaaaaattataatgtttcctctttcatattcgtagttagttctcttttcatgttcgaaaaagtgaaacatgcggttaaaatagtttataacattaatattactgttaataactgccggataaaagtgggatagtaatttcacgaatttgatactgtcctttctctcgttaaacgcctttaaaaaaactttagaagaatatctcaatgagagttcctgaccatccatagtttgtatcaataatagcaacatatgaagaacacgtttatacagagtatgtaaaaatgttaatttatagtttaatcccatggcccacgcacacacgattaattttttttcatctccctttagattgttgtatagaaatttgggtactgtgaactccgccgtagtttccatgggactatataattttgtggcctcgaatacaaattttactacatagttatctatcttaaagactataccatatcctcctgtagatatgtgataaaaatcgtcgtttataggataaaatcgtttatccttttgttggaaaaaggatgaattaatgtaatcattctcttctatctttagtagtgtttccttattaaaattcttaaaataatttaacaatctaactgacggagcccaattttggtgtaaatctaattgggacattatattgttaaaatacaaacagtctcctaatataacagtatctgataatctatggggagacatccattgatattcaggggatgaatcattggcaacacccatttattgtacaaaaagccccaatttacaaacgaaagtccaggtttgatagagacaaacaattaactattttgtctctgtttttaacacctccacagtttttaatttctttagtaatgaaattattcacaatatcagtatcttctttatctaccagagattttactaacttgataaccttggctgtctcattcaatagggtagtaatatttgtatgtgtgatattgatatctttttgaattgtttcttttagaagtgattctttgatggtgccagcatacgaattacaataatgcagaaactcggttaacatgcaggaattatagtaagccaattccaattgttgcctgtgttgtattagagtgtcaatatgagcaatggtgtccttgcgtttctctgatagaatgcgagcagcgattttggcgttatcatttgacgatatttctggaatgacgaatcctgtttctactaactttttggtaggacaaagtgaaacaatcaagaagatagcttctcctcctatttgtggaagaaattgaactcctctagatgatctactgacgatagtatctccttgacagatattggaccgaattacagaagtacctggaatgtaaagccctgaaaccccctcattttttaagcagattgttgccgtaaatcctgcactatgcccaagatagagagctcctttggtgaatccatctctatgtttcagtttaaccaagaaacagtcagctggtctaaaatttccatctctatctaatacagcatctaacttgatgtcaggaactatgaccggtttaatgttatatgtaacattgagtaaatccttaagttcataatcatcactgtcatcagttatgtacgatccaaacaatgtttctaccggcatagtggatacgaagatgctatccatcagaatgtttccctgattagtattttctatatagctattcttctttaaacgattttccaaatcagtaactatgttcatttttttaggagtaggacgcctagccagtatggaagaggattttctagatcctctcttcaacatctttgatctcgatggaatgcaaaaccccatagtgaaacaaccaacgataaaaataatattgtttttcactttttataattttaccatctgactcatggattcattaatatctttataagagctactaacgtataattctttataactgaactgagatatatacaccggatctatggtttccataattgagtaaatgaatgctcggcaataactaatggcaaatgtatagaacaacgaaattatactagagttgttaaagttaatattttctatgagctgttccaataaattatttgttgtgactgcgttcaagtcataaatcatcttgatactatccagtaaaccgtttttaagttctggaatattatcatcccattgtaaagcccctaattcgactatcgaatatcctgctctgatagcagtttcaatatcgacggacgtcaatactgtaataaaggtggtagtattgtcatcatcgtgataaactacgggaatatggtcgttagtaggtacggtaactttacacaacgcgatatataactttccttttgtaccatttttaacgtagttgggacgtcctgcagggtattgttttgaagaaatgatatcgagaacagatttgatacgatatttgttggattcctgattattcactataatataatctagacagatagatgattcgataaatagagaaggtatatcgttggtaggataatacatccccattccagtattctcggatactctattgatgacactagttaagaacatgtcttctattctagaaaacgaaaacatcctacatggactcattaaaacttctaacgctcctgattgtgtctcgaatgcctcgtacaaggatttcaaggatgccatagattctttgaccaacgatttagaattgcgtttagcatctgatttttttattaaatcgaatggtcggctctctggtttgctaccccaatgataacaatagtcttgtaaagataaaccgcaagaaaatttatacgcatccatccaaataaccctagcaccatcggatgatattaatgtattattatagattttccatccacaattattgggccagtatactgttagcaacggtatatcgaatagattactcatgtaacctactagaatgatagttcgtgtactagtcataatatctttaatccaatctaaaaaatttaaaattagattttttacactgttaaagttaacaaaagtattacccgggtacgtggatatcatatatggcattggtccattatcagtaatagctccataaactgatacggcgatggtttttatatgtgtttgatctaacgaggaagaaattcgcgcccacaattcatctctagatatgtatttaatatcaaacggtaacacatcaatttcgggacgcgtatatgtttctaaatttttaatccaaatataatgatgacctatatgccctattatcatactgtcaactatagtacacctagggaacttacgatacatctgtttcctataatcgttaaattttacaaatctataacatgctaaaccttttgacgacagccattcattaatttctgatatggaatctgtattctcgataccgtatcgttctaaagccagtgctatatctccctgttcgtgggaacgctttcgtataatatcgatcaacggataatctgaagtttttggagaataatatgactcatgatctatttcgtccataaacaatctagacataggaattggaggcgatgatcttaattttgtgcaatgagtcgtcaatcctataacttctaatcttgtaatattcatcatcgacataatactatctatgttatcatcgtatattagtataccatgaccttcttcatttcgtgccaaaatgatatacagtcttaaatagttacgcaatatctcaatagtttcataattgttagctgttttcatcaaggtttgtatcctgtttaacatgatggcgttctataacgtctctattttctatttttaattttttaaatttttaacgatttactgtggctagatacccaatctctctcaaatatttttttagcctcgcttacaagctgtttatctatactattaaaactgacgaatccgtgattttggtaatgggttccgtcgaaatttgccgaagtgatatgaacatattcgtcgtcgactatcaacaattttgtattattctgaatagtgaaaaccttcacagatagatcattttgaacacacaacgcatctagacttttggcggttgccatagaatatacgtcgttcttatcccaattaccaactagaagtctgatcttaactcctctattaatggctgcttctataatggagttgtaaatgtcgggccaatagtagctattaccgtcgacacgtgtagtgggaactatggccaaatgttcaatatctatactagtcttagctgacctgagtttatcaataactacatcggtatctagatctctagaatatcccaataggtgttccggagaatcagtaaagaacactccacctataggattcttaatatgatacgcagtgctaactggcaaacaacaagccgcagagcataaattcaaccatgaattttttgcgctattaaaggctttaaaagtatcaaatcttctacgaagatctgtggccagcgggggataatcagaatatacacctaacgttttaatcgtatgtatagatcctccagtaaatgacgcgtttcctacataacatctttcatcatctgacacccaaaaacaaccgagtagtagtcccacattattttttttatctatattaacggttataaaatttatatccgggcagtgactttgtagctctcccagatttcttttccctcgttcatctagcaaaactattattttaatccctttttcagatgcctcttttagtttatcaaaaataagcgctcccctagtcgtactcagaggattacaacaaaaagatgctatgtatatatatttcttagctagagtgataatttcgttaaaacattcaaatgttgttaaatgatcggatctaaaatccatattttctggtagtgtttctaccagcctacattttgctcccgcaggtaccgatgcaaatggccacatttagttaacataaaaacttatacatcctgttctatcaacgattctagaatatcatcggctatatcgctaaaattttcatcaaagtcgacatcacaacctaactcagtcaatatattaagaagttccatgatgtcatcttcgtctatttctatatccgtatccattgtagattgttgaccgattatcgagtttaaatcattactaatactcaatccttcagaatacaatctgtgtttcattgtaaatttataggcggtgtatttaagttggtagattttcaattatgtattaatatagcaacagtagttcttgctcctccttgattctagcatcctcttcattattttcttctacgtacataaacatgtccaatacgttagacaacacaccgacgatggcggccgcagatctcgagttatgatctacttccttaccgtgcaataaattagaatatattttctacttttacgagaaattaattattgtatttattatttatgggtgaaaaacttactataaaaagcgggtgggtttggaattagtgaaagcttaaaaattgaaattttattttttttttttggaatataaataagctcgaagtcgacagatctaggcctggtaccaggaggaggaattcagcttaaagatgacttcgaaagtttatgatccagaacaaaggaaacggatgataactggtccgcagtggtgggccagatgtaaacaaatgaatgttcttgattcatttattaattattatgattcagaaaaacatgcagaaaatgctgttatttttttacatggtaacgcggcctcttcttatttatggcgacatgttgtgccacatattgagccagtagcgcggtgtattataccagatcttattggtatgggcaaatcaggcaaatctggtaatggttcttataggttacttgatcattacaaatatcttactgcatggtttgaacttcttaatttaccaaagaagatcatttttgtcggccatgattggggtgcttgtttggcatttcattatagctatgagcatcaagataagatcaaagcaatagttcacgctgaaagtgtagtagatgtgattgaatcatgggatgaatggcctgatattgaagaagatattgcgttgatcaaatctgaagaaggagaaaaaatggttttggagaataacttcttcgtggaaaccatgttgccatcaaaaatcatgagaaagttagaaccagaagaatttgcagcatatcttgaaccattcaaagagaaaggtgaagttcgtcgtccaacattatcatggcctcgtgaaatcccgttagtaaaaggtggtaaacctgacgttgtacaaattgttaggaattataatgcttatctacgtgcaagtgatgatttaccaaaaatgtttattgaatcggatccaggattcttttccaatgctattgttgaaggcgccaagaagtttcctaatactgaatttgtcaaagtaaaaggtcttcatttttcgcaagaagatgcacctgatgaaatgggaaaatatatcaaatcgttcgttgagcgagttctcaaaaatgaacaagcggccgccgccaccatgagcaagggcgaggaactgttcactggcgtggtcccaattctcgtggaactggatggcgatgtgaatgggcacaaattttctgtcagcggagagggtgaaggtgatgccacatacggaaagctcaccctgaaattcatctgcaccactggaaagctccctgtgccatggccaacactggtcactaccttcacctatggcgtgcagtgcttttccagatacccagaccatatgaagcagcatgactttttcaagagcgccatgcccgagggctatgtgcaggagagaaccatctttttcaaagatgacgggaactacaagacccgcgctgaagtcaagttcgaaggtgacaccctggtgaatagaatcgagctgaagggcattgactttaaggaggatggaaacattctcggccacaagctggaatacaactataactcccacaatgtgtacatcatggccgacaagcaaaagaatggcatcaaggtcaacttcaagatcagacacaacattgaggatggatccgtgcagctggccgaccattatcaacagaacactccaatcggcgacggccctgtgctcctcccagacaaccattacctgtccacccagtctgccctgtctaaagatcccaacgaaaagagagaccacatggtcctgctggagtttgtgaccgctgctgggatcacacatggcatggacgagctgtacaagtgagcggccgccctgctagcaagcttgctagcggccgctcgagatctgcggccgctacagacacgaatatgactaaaccgatgaccatttaaaaacccctctctagctttcacttaaactgtatcgatcattcttttagcacatgtataatataaaaacattattctatttcgaatttaggcttccaaaaatttttcatccgtaaaccgataataatatatatagacttgttaatagtcggaataaatagattaatgcttaaactatcatcatctccacgattagagatacaatatttacattctttttgctgtttcgaaactttatcaatacacgttaatacaaacccaggaaggagatattgaaactgaggctgttgaaaatgaaacggtgaatacaataattcagataatgtaaaatcatgattccgtattctgatgatattagaactgctaatggatgtcgatggtatgtatctaggagtatctattttaacaaagcatcgatttgctaatatacaattatccttttgattaattgttattttattcatattcttaaaaggtttcatatttatcaattcttctacattaaaaatttccatttttaatttatgtagccccgcaatactcctcattacgtttcattttttgtctataatatccattttgttcatctcggtacatagattatccaattgagaagcgcatttagtagttttgtacattttaagtttattgacgaatcgtcgaaaactagttatagttaacattttattatttgataccctgatattaatacccctgccgttactattatttataactgatgtaatccacgtaacattggaattaactatcgatagtaatgcatcgacgcttccaaaattgtctattataaactcaccgataatttttttattgcatgttttcatattcattaggattatcaaatctttaatcttattacgattgtatgcgttgatattacaagacgtcattctaaaagacggaggatctccatcaaatgccagacaatcacgtacaaagtacatggaaataggttttgttctattgcgcatcatagatttatatagaacacccgtagaaatactaatttgttttactctataaaatactaatgcatctatttcatcgttttgtataacgtctttccaagtgtcaaattccaaatttttttcattgatagtaccaaattcttctatctctttaactacttgcatagataggtaattacagtgatgcctacatgccgttttttgaaactgaatagatgcgtctagaagcgatgctacgctagtcacaatcaccactttcatatttagaatatatatatgtaaaaatatagtagaatttcattttgtttttttctatgctataaatgaattctcattttgcatctgctcatactccgttttatattaataccaaagaaggaagatatctggttctaaaagccgttaaagtatgcgatgttagaactgtagaatgcgaaggaagtaaagcttcctgcgtactcaaagtagataaaccctcatcgcccgcgtgtgagagaagaccttcgtccccgtccagatgcgagagaatgaataaccctggaaaacaagttccgtttatgaggacggacatgctacaaaatatgttcgcggctaatcgcgataatgtagcttctagacttttgtcctaaaatactattatatccttttcgatattaataaatccgtgtcgtccaggttttttatctctttcagtatgtgaatagataggtattttatctctattcatcatcgaatttaagagatccgataaacattgtttgtattctccagatgtcagcatctgatacaacaatatatgtgcacataaacctctggcacttatttcatgtaccttccccttatcactaaggagaatagtatttgagaaatatgtatacatgatattatcatgaattagatatacagaatttgtaacactctcgaaatcacacgatgtgtcggcgttaagatctaatatatcactcgataacacattttcatctagatacactagacattttttaaagctaaaatagtctttagtagtaacagtaactatgcgattattttcatcgatgatacatttcatcggcatattattacgcttaccatcaaagactataccatgtgtatatctaacgtattctagcatggttgccatacgcgcattaaacttttcaggatctttggatagatcttccaatctatctatttgagaaaacatttttatcatgttcaatagttgaaacgtcggatccactatatagatattatctataaagattttaggaactacgttcatggtatcctggcgaatattaaaactatcaatgatatgattatcgttttcatcttttatcaccatatagtttctaagatatgggattttacttaatataatattatttcccgtgataaattttattagaaaggccaaatctataagaaaagtcctagaattagtctgaagaatatctatatcgccgtatagtatatttggattaattagatatagagaatatgatccgtaacatatacaacttttattatggcgtctaagatattcttccatcaacttattaacatttttgactagggaagatacattatgacgtcccattacttttgccttgtctattactgcgacgttcatagaatttagcatatctcttgccaattcttccattgatgttacattataagaaattttagatgaaattacatttggagctttaatagtaagaactcctaatatgtccgtgtatgtggtcactaatacagattgtagttctataatcgtaaataatttacctatattatatgtttgagtctgtttagaaaagtagctaagtatacgatcttttatttctgatgcagatgtattaacatcggaaaaaaatctttttttattcttttttactaaagatacaaatatgtctttgttaaaaacagttattttctgaatatttctagcttgtaattttaacatatgatattcgttcacactaggtactctgcctaaataggtttctataatctttaatgtaatattaggaaaagtattctgatcaggattcctattcattttgaggatttaaaactctgattattgtctaatatggtctctacgcaaactttttcacagagcgatagagtttttgataactcgtttttcttaagaaatataaaactactgtctccagagctcgctctatcttttattttatctaattcgatacaaactcctgatactggttcagaaagtaattcattaattttcagtcctttatagaagatatttaatatagataatacaaaatcttcagtttttgatatcgatctgattgatcctagaactagatatattaataacgtgctcattaggcagtttatggcagcttgataattagatatagtatattccagttcatatttattagataccgcattgcccagattttgatattctatgaattcctctgaaaataaatccaaaataactagacattctattttttgtggattagtgtactctcttccctctatcatgttcactactggtgtccacgatgataaatatctagagggaatataatatagtccataggatgccaatctagcaatgtcgaataactgtaattttattcttcgctcttcattatgaattgattcttgaggtataaacctaacacaaattatattattagacttttcgtatgtaatgtctttcatgttataagtttttaatcctggaatagaatctattttaatgaggcttttaaacgcagagttctccaacgagtcaaagcataatactctgttgtttttcttatatacgatgttacgattttcttctttgaatggaataggtttttgaattagtttataattacaacataatagataaggaagtgtgcaaatagtacgcggaaaaaacataatagctcccctgttttcatccatggttttaagtaaatgatcactggcttctttagtcaatggatattcgaacattaaccgtttcatcatcattggacagaatccatatttcttaatgtaaagagtgatcaaatcattgtgtttattgtaccatcttgttgtaaatgtgtattcggttatcggatctgctcctttttctattaaagtatcgatgtcaatctcgtctaagaattcaactatatcgacatatttcatttgtatacacataaccattactaacgtagaatgtataggaagagatgtaacgggaacagggtttgttgattcgcaaactattctaatacataattcttctgttaatacgtcttgcacgtaatctattatagatgccaagatatctatataattattttgtaagatgatgttaactatgtgatctatataagtagtgtaataattcatgtattttgatatatgttccaactctgtctttgtgatgtctagtttcgtaatatctatagcatcctcaaaaaatatattcgcatatattcccaagtcttcagttctatcttctaaaaaatcttcaacgtatggaatataataatctattttacctcttctgatatcattaatgatatagtttttgacactatcttctgtcaattgattcttattcactatatctaagaaacggatagcgtccctaggacgaactactgccattaatatctctattatagcttctggacataattcatctattataccagaattaatgggaactattccgtatctatctaacatagttttaagaaagtcagaatctaagacttgatgttcatatattggttcatacatgaaatgatctctattgatgatagtgactatttcattctctgaaaattggtaactcattctatatatgctttccttgttgatgaaggatagaatatactcaatagaatttgtaccaacaaactgttctcttatgaatcgtatatcatcatctgaaataatcatgtaaggcatacatttaacaattagagacttgtctcctgttatcaatatactattcttgtgataatttatgtgtgaggcaaatttgtccacgttctttaattttgttatagtagatatcaaatccaatggagctacagttcttggcttaaacagatatagtttttctggaacaaattctacaacattattataaaggactttgggtagataagtgggatgaaatcctattttaattaatgcgatagccttgtcctcgtgcagatatccaaacgcttttgtgatagtatggcattcattgtctagaaacgctctacgaatatctgtgacagatatcatctttagagaatatactagtcgcgttaatagtactacaatttgtattttttaatctatctcaataaaaaaattaatatgtatgattcaatgtataactaaactactaactgttattgataactagaatcagaatctaatgatgacgtaaccaagaagtttatctactgccaatttagctgcattatttttagcatctcgtttagattttccatcggccttatcgaatactcttccgtcgatgtctacacaggcataaaatgtaggagagttactaggcccaactgattcaatacgaaaagaccaatctctcctagtaatttggcagtactcattaataacggtgacagggttagcatctttccaatcaataatttttttagccggaataacatcatcaaaagacttatgatcctctctcattgatttttcgcgggatacatcatctattatgacgtcagccatagcatcagcatccggcttatccgcctccgttgtcataaaccaacgaggaggaatatcgtcggagctgtacaccatagcactacgttgaagatcgtacagagctttattaacttctcgcttctccatattaagttgtctagttagttgtgcagcagtagctccttcgattccaatgtttttaatagccgcacacacaatctctgcgtcagaacgctcgtcaatatagatcttagacatttttagagagaactaacgcaaccagcaataaaactgaacctactttatcatttttttattcatcatcctctggtggttcgtcgttcctatcaaatgtagctctgattaacccgtcatctataggtgatgctggttctggagattctggaggagatggattattatctggaagaatctctgttatttccttgttttcatgtatcgattgcgttgtaacattaagattgcgaaatgctctaaatttgggaggcttaaagtgttgtttgcaatctctacacgcgtgtctaactagtggaggttcgtcagctgctctagtttgaatcatcatcggcgtagtattcctacttttacagttaggacacggtgtattgtatttctcgtcgagaacgttaaaataatcgttgtaactcacatcctttattttatctatattgtattctactcctttcttaatgcattttataccgaataagagatagcgaaggaattctttttcggtgccgctagtacccttaatcatatcacatagtgttttatattccaaatttgtggcaatagacggtttatttctatacgatagtttgtttctggaatcctttgagtattctataccaatattattctttgattcgaatttagtttcttcgatattagattttgtattacctatattcttgatgtagtactttgatgatttttccatggcccattctattaagtcttccaagttggcatcatccacatattgtgatagtaattctcggatatcagtagcggctaccgccattgatgtttgttcattggatgagtaactactaatgtatacattttccatttataacacttatgtattaactttgttcatttatattttttcattattatgttgatattaacaaaagtgaatatatatatgttaataattgtattgtggttatacggctacaattttataatgagtgaaagtcagtgtccgatgatcaatgacgatagctttactctgaaaagaaagtatcaaatcgatagtgcggagtcaacaataaaaatggataagaagaggataaagtttcagaatagagccaaaatggtaaaagaaataaatcagacaataagagcagcacaaactcattacgagacattgaaactaggatacataaaatttaagagaatgattatgactactactctagaagatatagcaccatctattccaaataatcagaaaacttataaactattctcggacatttcagccatcggcaaagcatcacagaatccgagtaagatggtatatgctctgctgctttacatgtttcccaatttgtttggagatgatcatagattcattcgttatagaatgcatccaatgagtaaaatcaaacacaagatcttctctcctttcaaacttaatcttattagaatattagtggaagaaagattctataataatgaatgcagatctaataaatggagaataattggaacacaagttgataaaatgttgatagctgaatctgataaatatacaatagatgcaaggtataacctaaaacccatgtatagaatcaagggagaatctgaagaagataccctctttatcaaacagatggtagaacaatgtgtgacatcccaggaattggtggaaaaagtgttgaagatactgtttagagatttgttcaagagtggagaatacaaagcgtacagatacgatgatgatgtagaaaatggatttattggattggatacactaaaattaaacattgttcatgatatagttgaaccatgtatgcctgttcgtaggccagtggctaagatactgtgtaaagaaatggtaaataaatactttgagaatccgctacatattattggtaaaaatcttcaagagtgcattgactttgttagtgaataggcatttcatctttctccaatactaattcaaattgttaaattaataatggatagtataaatagttattagttataagatagtaaaaataattattagaataagagtgtagtatcatagataactctcttctataaaaatggattttattcgtagaaagtatcttatatacacagtagaaaataatatagattttttaaaggatgatacattaagtaaagtaaacaattttaccctcaatcatgtactagctctcaagtatctagttagcaattttcctcaacacgttattactaaggatgtattagctaataccaatttttttgttttcatacatatggtacgatgttgtaaagtgtacgaagcggttttacgacacgcatttgatgcacccacgttgtacgttaaagcattgactaagaattatttatcgtttagtaacgcaatacaatcgtacaaggaaaccgtgcataaactaacacaagatgaaaaatttttagaggttgccgaatacatggacgaattaggagaacttataggcgtaaattatgacttagttcttaatccattatttcacggaggggaacccatcaaagatatggaaatcatttttttaaaactgtttaagaaaacagacttcaaagttgttaaaaaattaagtgttataagattacttatttgggcatacctaagcaagaaagatacaggcatagagtttgcggataatgatagacaaaatatatacactctatttcaacaaactggtagaatcgtccatagcaatctaacagaaacgtttagagattatatctttcccggagataagactagctattgggtgtggttaaacgaaagtatagctaatgatgcggatatcgttcttaatagacacgccattaccatgtatgataaaattcttagttatatatactctgagataaaacaaggacgcgttaataaaaacatgcttaagttagtttatatctttgagcctgaaaaagatatcagagaacttctgctagaaatcatatatgatattcctggagatatcctatctattattgatgcaaaaaacgacgattggaaaaaatattttattagtttttataaagctaattttattaacggtaatacatttattagtgatagaacgtttaacgaggacttattcagagttgttgttcaaatagatcccgaatatttcgataatgaacgaattatgtctttattctctacgagtgctgcggacattaaacgatttgatgagttagatattaataacagttatatatctaatataatttatgaggtgaacgatatcacattagatacaatggatgatatgaagaagtgtcaaatctttaacgaggatacgtcgtattatgttaaggaatacaatacatacctgtttttgcacgagtcggatcccatggtcatagagaacggaatactaaagaaactgtcatctataaaatccaagagtagacggctgaacttgtttagcaaaaacattttaaaatattatttagacggacaattggctcgtctaggtcttgtgttagatgattataaaggagacttgttagttaaaatgataaaccatcttaagtctgtggaggatgtatccgcattcgttcgattttctacagataaaaaccctagtattcttccatcgctaatcaaaactattttagctagttataatatttccatcatcgtcttatttcaaaggtttttgagagataatctatatcatgtagaagaattcttggataaaagcatccatctaaccaagacggataagaaatatatacttcaattgataagacacggtagatcatagaacagaccaaatatattattaataatttgtatatacatagatataattatcacacatttttgataaatgggaactgctgcaacaattcagactcccaccaaattaatgaataaagaaaatgcagaaatgattttggaaaaaattgttgatcatatagttatgtatattagtgacgaatcaagtgattcagaaaataatcctgaatatattgattttcgtaacagatacgaagactatagatctctcattataaaaagtgatcacgagtttgtaaagctatgtaaaaatcatgcggagaaaagttctccagaaacgcaacaaatgattatcaaacacatatacgaacaatatcttattccagtatctgaagtactattaaaacctataatgtccatgggtgacataattacatataacggatgtaaagacaatgaatggatgctagaacaactctctaccctaaactttaacaatctccgcacatggaactcatgtagcataggcaatgtaacgcgtctgttttatacattttttagttatctgatgaaagataaactaaatatataagtataatcccattctaatactttaacctgatgtattagcatcttattagaatattaacctaactaaaagacataacataaaaactcattacatagttgataaaaagcggtaggatataaatattatggctgccaccgttccgcgttttgacgacgtgtacaaaaatgcacaaagaagaattctagatcaagaaacattttttagtagaggtctaagtagaccgttaatgaaaaacacatatctatttgataattacgcgtatggatggataccagaaactgcaatttggagtagtagatacgcaaacctagatgctagtgactattatcccatttcgttgggattacttaaaaagttcgagtttctcatgtctctatataaaggtcctattcccgtatatgaagaaaaagtaaatactgaattcatagccaatggatcgttctctggtagatacgtatcatatcttcgaaagttttctgcccttccaacaaacgagtttattagttttttgttactgacttccattccaatctataatatcttgttctggtttaaaaacacacagtttgatattactaaacacacattattcagatacgtctatacagataatgccaaacacctggcgttggctaggtatatgcatcaaacaggagactataagcctttgtttagtcgtctcaaagagaattatatatttaccggtcccgttccaataagtatcaaagatatagatcaccctaatcttagtagagcaagaagtccatccgattatgagacattagctaatattagtactatattgtactttaccaagtatgatccggtattaatgtttttattgttttacgtacctgggtattcaattactacaaaaattactccagccgtagaatatctaatggataaactgaatctaacaaagagcgacgtacaactgttgtaaattattttatgcttcgtaaaatgtaggttttgaaccaaacattctttcaaagaatgagatgcataaaactttattatccaatagattgactatttcggacgtcaatcgtttaaagtaaacttcgtaaaatattctttgatcactgccgagtttaaaacttctatcgataattgtctcatatgttttaatatttacaagttttttggtccatggtacattagccggacaaatatatgcaaaataatatcgttctccaagttctatagtttctggattatttttattatattcagtaactaaatacatattagggttatctgcggatttataatttgagtgatgcattctactcaacataaataattctagaggagacgatctactatcaaattcggatcgtaaatctgtttctaaagaacggagaatatctatacatacctgattagaattcatccgtccttcagacaacatctcagacagtctggttttgtacatcttaatcatattcttatgaaacttggaaacatctcttctagtttcactagtacctttattaattctctcaggtacagattttgaattcgacgatgctgagtatttcatcgttgtatatttcttcttcgattgcataatcagattcttatataccgcctcaaactctattttaaaattattaaacaatactctattattaatcagtcgttctaactctttcgctatttctatagacttatctacatcttgactgtctatctctgtaaacacggagtcggtatctccatacacgctacgaaaacgaaatctgtaatctataggcaacgatgttttcacaatcggattaatatctctatcgtccatataaaatggattacttaatggattggcaaaccgtaacataccgttagataactctgctccatttagtaccgattctagatacaagatcattctacgtcctatggatgtgcaactcttagccgaagcgtatgagtatagagcactatttctaaatcccatcagaccatatactgagttggctactatcttgtacgtatattgcatggaatcatagatggccttttcagttgaactggtagcctgttttagcatctttttatatctggctctctctgccaaaaatgttcttaatagtctaggaatggttccttctatcgatctatcgaaaattgctatttcagagatgaggttcggtagtctaggttcacaatgaaccgtaatatatctaggaggtggatatttctgaagcaatagctgattatttatttcttcttccaatctattggtactaacaacgacaccgactaatgtttccggagatagatttccaaagatacacacattaggatacagactgttataatcaaagattaatacattattactaaacattttttgttttggagcaaataccttaccgccttcataaggaaacttttgttttgtttctgatctaactaagatagttttagtttccaacaatagctttaacagtggacccttgatgactgtactcgctctatattcgaataccatggattgaggaagcacatatgttgacgcacccgcgtctgtttttgtttctactccataatactcccacaaatactgacacaaacaagcatcatgaatacagtatctagccatatctaaagctatgtttagattataatccttatacatctgagctaaatcaacgtcatcctttccgaaagataatttatatgtatcattaggtaaagtaggacataatagtacgactttaaatccattttcccaaatatctttacgaattactttacatataatatcctcatcaacagtcacataattacctgtggttaaaacctttgcaaatgcagcggctttgcctttcgcgtctgtagtatcgtcaccgatgaacgtcatttctctaactcctctatttaatactttacccatgcaactgaacgcgttcttggatatagaatccaatttgtacgaatccaatttttcaaatttttgaatgaatgaatatagatcgaaaaatatagttccattattgttattaacgtgaaacgtagtattggccatgccgcctactcccttatgactagactgatttctctcataaatacagagatgtacagcttcctttttgtccggagatctaaagataattttctctcctgttaataactctagacgattagtaatatatctcagatcaaagttatgtccgttaaaggtaacgacgtagtcgaacgttagttccaacaattgtttagctattcgtaacaaaactatttcagaacatagaactagttctcgttcgtaatccatttccattagtgactgtatcctcaaacatcctctatcgacggcttcttgtatttcctgttccgttaacatctcttcattaatgagcgtaaacaataatcgtttaccacttaaatcgatataacagtaacttgtatgcgagattgggttaataaatacagaaggaaacttcttatcgaagtgacactctatatctagaaataagtacgatcttgggatatcgaatctaggtatttttttagcgaaacagttacgtggatcgtcacaatgataacatccattgttaatctttgtcaaatattgctcgtccaacgagtaacatccgtctggagatatcccgttagaaatataaaaccaactaatattgagaaattcatccatggtggcattttgtatgctgcgtttctttggctcttctatcaaccacatatctgcgacggagcattttctatctttaatatctagattataacttattgtctcgtcaatgtctatagttctcatctttcccaacggcctcgcattaaatggaggaggagacaatgactgatatatttcgtccgtcactacgtaataaaagtaatgaggaaatcgtataaatacggtctcgccatttcgacatctggatttcagatataaaaatctgttttcaccgtgactttcaaaccaattaatgcaccgaacatccatttatagaatttagaaatatattttcatttaaatgaatcccaaacattggggaagagccgtatggaccattatttttatagtactttcgcaagcgggtttagacggcaacatagaagcgtgtaaacgaaaactatatactatagttagcactcttccatgtcctgcatgtagacggcacgcgactatcgctatagaggacaataatgtcatgtctagcgatgatctgaattatatttattattttttcatcagattatttaacaatttggcatctgatcccaaatacgcgatcgatgtgacaaaggttaaccctttataaacttaacccattataaaacttatgattagtcacaactgaaataaccgcgtgattattttttggtataattctacacggcatggtttctgtgactatgaattcaacccccgttacattagtgaaatctttaacaaacagcaagggttcgtcaaagacataaaactcattgtttacaatcgaaatagaccccctatcacacttaaaataaaaaatatccttatcctttaccaccaaataaaattctgattggtcaatgtgaatgtattcacttaacagttccacaaatttatttattaactccgaggcacatacatcgtcggtattttttatggcaaactttactcttccagcatccgtttctaaaaaaatattaacgagttccatttatatcatccaatattattgaaatgacgttgatggacagatgatacaaataagaaggtacggtacctttgtccaccatctcctccaattcatgctctattttgtcattaactttaatgtatgaaaacagtacgccacatgcttccatgacagtgtgtaacactttggatacaaaatgtttgacattagtataattgtccaagactgtcaatctataatagatagtagctataatatattctatgatggtattgaagaagatgacaaccttggcatattgatcatttaacacagacatggtatcaacagatagcttgaatgaaagagaatcagtaattggaataagcgtcttctcgatagagtgtccgtataccaacatgtctgatattttgatgtattccattaaattatttagttttttctttttattctcgttaaacagcatttctgtcaacggaccccaacatcgttgaccgattaagttttgattgatttttccgtgtaaggcgtatctagtcagatcgtatagcctatccaataatccatcgtctgtgtgtagatcacatcgtacactttttaattctctatagaagagcgacagacatctggagcaattacagacagcaatttctttattctctacagatgtaagatacttgaagacattcctatgatgatgcagaattttggataacacggtattgatggtatctgttaccataattcctttgatggctgatagtgtcagagcacaagatttccaatctttgacaatttttagcaccattatctttgttttgatatctatatcagacagcatggtgcgtctgacaacacagggattaagacggaaagatgaaatgattctctcaacatcttcaatagataccttgctattttttctggcattatctatatgtgcgagaatatcctctagagaatcagtatcctttttgatgatagtggatctcaatgacatgggacgtttaaaccttcttattctatcaccagattgcatggtgatttgtcttctttcttttatcataatgtaatctctaaattcatcggcaaattgtctatatctaaaatcataatatgagatgtttacctctacaaatatctgttcgtccaatgttagagtatttacatcagttttgtattccaaattaaacatggcaacggatttaattttatattcctctattaagtcctcgtcgataataacagaatgtagataatcatttaatccgtcgtacatggttggaagatgcttgttgacaaaatctttaattgtcttgatgaaggtgggactatatctaacatcttgattaataaaatttataacattgtccataggatactttgtaactagttttatacacatctcttcatcggtaagtttagacagaatatcgtgaacaggtggtatattatattcatcagatatacgaagaacaatgtccaaatctatattgtttaatatattatatagatgtagcgtagctcctacaggaatatctttaactaagtcaatgatttcatcaaccgttagatctattttaaagttaatcatataggcattgatttttaaaaggtatgtagccttgactacattctcattaattaaccattccaagtcattgtgtgtaagaagattatattctatcataagcttgactacatttggtcccgataccattaaagaattcttatgatataaggaaacagattttaggtactcatctactctacaagaattttggagagccttaacgatatcagtgacgtttattatttcaggaggaaagaatctaacattgagaatatcggaattaatagcttccagatacagtgattttggcaatagtccgtgtaatccataatccagtaacacgagctggtgcttgctagacaccttttcaatgtttaatttttttgaaataagctttgataaagccttcctcgcaaattccggatacatgaacatgtcggcgacatgattaagtattgttttttcattatttttatattttctcaacaagttctcaataccccaatagatgatagaatatcacccaatgcgtccatgttgtctatttccaacaggtcgctatatccaccaatagaagtttttccaaaaaagattctaggaacagttctaccaccagtaatttgttcaaaataatcccgcaattcattttcgggtttaaattctttaatatcgacaatttcatacgctcctcttttgaaactaaacttatttagaatatccagtgcatttctacaaaaaggacatgtatacttgacaaaaattgtcactttgttattggccaacctttgttgtacaaattcctcggccattttaatatttaagtgatataaaactatctcgacttatttaactctttagtcgagatatatggacgcagatagctatatgatagccaactacagaaggcaaacgctataaaaaacataattacgacgagcatatttataaatatttttattcagcattacttgatatagtaatattaggcacagtcaaacattcaaccactctcgatacattaactctctcattttctttaacaaattctgcaatatcttcgtaaaaagattcttgaaactttttagaatatctatcgactctagatgaaatagcgttcgtcaacatactatgttttgtatacataaaggcgcccattttaacagtttctagtgacaaaatgctagcgatcctaggatcctttagaatcacatagattgacgattcgtctctcttagtaactctagtaaaataatcatacaatctagtacgcgaaataatattatccttgacttgaggagatctaaacaatctagttttgagaacatcgataagttcatcgggaatgacatacatactatctttaatagaactcttttcatccagttgaatggattcgtccttaaccaactgattaatgagatcttctattttatcattttccagatgatatgtatgtccattaaagttaaattgtgtagcgcttctttttagtctagcagccaatactttaacatcactaatatcgatatacaaaggagatgatttatctatggcattaagaattcgtttttcgacatccgtcaaaaccaattcctttttgcctgtatcatccagttttccatcctttgtaaagaaattattttctactagactattaataagactgataaggattcctccataattgcacaatccaaactttttaacaaaactagactttacgagatctacaggaatgcgtacttcaggttttttagcttgtgattttttcttttgcggacattttctagtaaccaactcatctaccatttcattgattttagcagtgaaataagctttcaatgcacgggcactgatactattgaaaacgagttgatcttcaaattccgccatttaagttcaccaaacaacttttaaatacaaatatatcaatagtagtagaataagaactataaaaaaaataataattaaccaaccccaacaaccggtattattagttgatgtggtagttttctcatcacttagaacagatttaacaatttctataaagtctgtcaaatcatcttccggagaccccataaatacaccaaatatagcggcgtacaacttatccatttatacattgaatattggcttttctttatcgctatcttcatcatattcatcatcaatatcaacaagtcccagattacgagccagatcttcttctacattttcagtcattgatacacgttcactatctccagagagtccgataacgttagccaccacttctctatcaatgattagtttcttgagcgcgaaagtaatttttgtttccgttccggatctatagaagacgataggtgtgataattgccttggccaattgtctttctcttttactgagtgattctagttcaccttctatagatctgagaatggatgattctccagtcgaaacatattctaccatggatccgtttaatttgttgatgaagatggattcatccttaaatgttttctctgtaatagtttccaccgaaagactatgcaaagaatttggaatgcgttccttgtgcttaatgtttccatagacggcttctagaagttgatacaacataggactagccgcggtaacttttatttttagaaagtatccatcgcttctatcttgtttagatttatttttataaagtttagtctctccttccaacataataaaagtggaagtcatttgactagataaactatcagtaagttttatagagatagacgaacaattagcgtattgagaagcatttagtgtaacgtattcgatacattttgcattagatttactaatcgattttgcatactctataacacccgcacaagtctgtagagaatcgctagatgcagtaggtcttggtgaagtttcaactctcttcttgattaccttactcatgattaaacctaaataattgtactttgtaatataatgatatatattttcactttatctcatttgagaataaaaatgtttttgtttaaccactgcatgatgtacagatttcggaatcgcaaaccaccagtggttttattttatccttgtccaatgtgaattgaatgggagcggatgcgggtttcgtacgtagatagtacattcccgtttttagaccgagactccatccgtaaaaatgcatactcgttagtttggaataactcggatctgctatatggatattcatagattgactttgatcgatgaaggctcccctgtctgcagccatttttatgatcgtcttttgtggaatttcccaaatagttttataaactcgcttaatatcttctggaaggtttgtattctgaatggatccaccatctgccataatcctattcttgatctcatcattccataattttctctcggttaaaactctaaggagatgcggattaactacttgaaattctccagacaatactctccgagtgtaaatattactggtatacggttccaccgactcattatttcccaaaatttgagcagttgatgcagtcggcataggtgccaccaataaactatttctaagaccgtatgttctgattttatcttttagaggttcccaattccaaagatccgacggtacaacattccaaagatcatattgtagaataccgttactggcgtacgatcctacatatgtatcgtatggtccttccttctcagctagttcacaactcgcctctaatgcaccgtaataaatggtttcgaagatcttcttatttagatcttgtgcttccaggctatcaaatggataatttaagagaataaacgcgtccgctaatccttgaacaccaataccgataggtctatgtctcttattagagatttcagcttctggaataggataataattaatatctataattttattgagatttctgacaattactttgaccacatccttcagtttgagaaaatcaaatcgcccatctattacaaacatgttcaaggcaacagatgccagattacaaacggctacctcattagcatccgcatattgtattatctcagtgcaaagattactacacttgatagttcctaaattttgttgattactctttttgttacacgcatccttataaagaatgaatggagtaccagtttcaatctgagattctataatcgctttccagacgactcgagcctttattatagatttgtatctcctttctctttcgtatagtgtatacaatcgttcgaactcgtctccccaaacattgtccaatccaggacattcatccggacacatcaacgaccactctccgtcatccttcactcgtttcataaagagatcaggaatccaaagagctataaatagatctctggttctatgttcctcgtttcctgtattctttttaagatcgaggaacgccataatatcagaatgccacggttccaagtatatggccataactccaggccgtttgtttcctccctgatctatgtatctagcggtgttattataaactctcaacattggaataataccgtttgatataccattggtaccggagatatagcttccactggcacgaatattactaattgatagacctattccccctgccattttagagattaatgcgcatcgttttaacgtgtcatagataccctctatgctatcatcgatcatgttaagtagaaaacagctagacatttggtgacgactagttcccgcattaaataaggtaggagaagcgtgcgtaaaccatttttcagaaagtagattgtacgtctcaatagctgagtctatatcccattgatgaattcctactgcgacacgcattaacatgtgctgaggtctttcaacgatcttgttgtttattttcaacaagtaggatttttccaaagttttaaaaccaaaatagttgtatgaaaagtctcgttcgtaaataataaccgagttgagtttatccttatatttgttaactatatccatggtgatacttgaaataatcggagaatgtttcccatttttaggattaacatagttgaataaatcctccatcacttcactaaatagtttttttgtttccttgtgtagatttgatacggctattctggcggctagaatggcataatccggatgttgtgtagtacaagtggctgctatttcggctgccagagtgtccaattctaccgttgttactccattatatattccttgaataaccttcatagctattttaataggatctatatgatccgtgtttaagccataacataattttctaatacgagacgtgattttatcaaacatgacattttccttgtatccatttcgtttaatgacaaacatttttgttggtgtaataaaaaaattatttaacttttcattaatagggatttgacgtatgtagcgtacaaaatgattgttcctggtatatagataaagagtcctatatatttgaaaatcgttacggctcgattaaactttaatgattgcatagtgaatatatcattaggatttaactccttgactatcatggcggcgccagaaattaccatcaaaagcattaatacagttataccgatcgcagttagaacggttatagcatccaccatttatatctaaaaattagatcaaagaatatgtgacaaagtcctagttgtatactgagaattgacgaaacaatgtttcttacatatttttttcttattagtaaccgacttaatagtaggaactggaaaactagacttgattattctataagtatagatacccttccaaataatattctctttgataaaagttccagaaaatgtagaattttttaaaaagttatcttttgctattaccaagattgtgtttagacgcttattattaatatgagtgatgaaatccacaccgcctctagatatcgcctttatttccacattagatggtaaatccaatagtgaaactatctttttaggaatgtatggactcgcgtttagaggagtaaacgtcttaggcgtcggaaaggatgattcatcaaacgaataaacaatttcacaaatggatgttaatgtattagtaggaaattttttgacgctattggaattgaagattctaatggatgatgttctacctatttcatccgataacatgttaatttccgacaccaacggttttaatatttcgatgatatacggtagtctctctttcggacttatatagcttattccacaatacgagtcattatatactccaaaaaacaaaataactagtataaaatctgtatcgaatgggaaaaacgaaattatcgacataggtatagaatccggaacattgaacgtattaatacttaattctttttctgtggtaagtaccgataggttattgacattgtatggttttaaatattctataacttgagacttgatagatattagtgatgaattgaaaattatttttatcaccacgtgtgtttcaggatcatcgtcgacgcccgtcaaccaaccgaacggagtaaaataaatatcattaatatatgctctagatattagtatttttatcaatcctttgattatcatcttctcgtaggcgaatgattccatgatcaagagtgatttaagaacatcctccggagtattaatgggcttagtaaacagtccatcgttgcaataataaaagttatccaagttaaaggatattatgcattcgtttaaagatatcacctcatctgacggagacaattttttggtaggttttagagactttgaagctacttgtttaacaaagttattcatcgtcgtctactattctatttaattttgtagttaatttatcacatatcacattaattgactttttggtccacttttccatacgtttatattcttttaatcctgcgttatccgtttccgttatatccagggatagatcttgcaagttaaatagaatgctcttaaataatgtcattttcttatccgctaaaaatttaaagaatgtataaacctttttcagagatttgaaactcttaggtggtgtcctagtacacaatatcataaacaaactaataaacattccacattcagattccaacagctgattaacttccacattaatacagcctattttcgctccaaatgtacattcgaaaaatctgaataaaacatcgatgtcacaatttgtattatccaatacagaatgtttgtgattcgtgttaaaaccatcggagaaggaatagaaataaaaattattatagtggtggaattcagttggaatattgcctccggagtcataaaaggatactaaacattgttttttatcataaattacacatttccaatgagacaaataacaaaatccaaacattacaaatctagaggtagaacttttaattttgtctttaagtatatacgataagatatgtttattcataaacgcgtcaaatttttcatgaatcgctaaggagtttaagaatctcatgtcaaattgtcctatataatccacttcggatccataagcaaactgagagactaagttcttaatacttcgattgctcatccaggctcctctctcaggctctattttcatcttgacgacctttggattttcaccagtatgtattcctttacgtgataaatcatcgattttcaaatccatttgtgagaagtctatcgccttagatactttttcccgtagtcgaggtttaaaaaaatacgctaacggtatactagtaggtaactcaaagacatcatatatagaatggtaacgcgtctttaactcgtcggttaactctttcttttgatcgagttcgtcgctactattgggtctgctcaggtgccccgactctactagttccaacatcataccgataggaatacaagacactttgccggcggttgtagatttatcatatttttccactacatatccgttacaatttgttaaaaatttagatacatctatattgctacataatccagctagtgaatatatatgacataataaattggtaaatcctagttctggtattttactaattactaaatctgtatatctttccatttatcatggaaaagaatttaccagatatcttcttttttccaaactgcgttaatgtattctcttacaaatattcacaagatgaattcagtaatatgagtaaaacggaacgtgatagtttctcattggccgtgtttccagttataaaacatagatggcataacgcacacgttgtaaaacataaaggaatatacaaagttagtacagaagcacgtggaaaaaaagtatctcctccatcactaggaaaacccgcacacataaacctaaccgcgaagcaatatatatacagtgaacacacaataagctttgaatgttatagttttctaaaatgtataacaaatacagaaatcaattcgttcgatgagtatatattaagaggactattagaagctggtaatagtttacagatattttccaattccgtaggtaaacgaacagatactataggtgtactagggaataagtatccatttagcaaaattccattggcctcattaactcctaaagcacaacgagagatattttcagcgtggatttctcatagacctgtagttttaactggaggaactggagtgggtaagacgtcacaggtacccaagttattgctttggtttaattatttatttggtggattctctactctagataaaatcactgactttcacgaaagaccagtcattctatctcttcctaggatagctttagttagattgcatagcaataccattttaaaatcattgggatttaaggtactagatggatctcctatttctttacggtacggatctataccggaagaattaataaacaaacaaccaaaaaaatatggaattgtattttctacccataagttatctctaacaaaactatttagttatggcactcttattatagacgaagttcatgagcatgatcaaataggagatattattatagcagtagcgagaaagcatcatacgaaaatagattctatgtttttaatgactgccacgttagaggatgacagggaacggctaaaagtatttttacctaatcccgcatttatacatattcctggagatacactgtttaaaattagcgaggtatttattcataataagataaatccatcttccagaatggcatacatagaagaagaaaagagaaatttagttactgctatacagatgtatactcctcctgatggatcatccggtatagtctttgtggcatccgttgcacagtgtcacgaatataaatcatatttagaaaaaagattaccgtatgatatgtatattattcatggtaaggtcttagatatagacgaaatattagaaaaagtgtattcatcacctaatgtatcgataattatttctactccttatttggaatccagcgttactatacgcaatgttacacacatttatgatatgggtagagtttttgtccccgctccttttggaggatcgcaacaatttatttctaaatctatgagagatcaacgaaaaggaagagtaggaagagttaatcctggtacatacgtctatttctatgatctgtcttatatgaagtctatacagcgaatagattcagaatttctacataattatatattgtacgctaataagtttaatctaacactccccgaagatttgtttataatccctacaaatttggatattctatggcgtacaaaggaatatatagactcgttcgatattagtacagaaacatggaataaattattatccaattattatatgaagatgatagagtatgctaaactttatgtactaagtcctattctcgctgaggagttggataactttgagaggacgggagaattaactagtattgtacgagaagccattttatctctaaatttacaaattaagattttaaattttaaacataaagatgatgatacgtatatacacttttgtaaaatattattcggtgtctataacggaacaaacgctactatatattatcatagacctctaacgggatatatgaatatgatttcagatactatatttgttcctgtagataataactaaaaatcaaactctaatgaccacatctttttttagagatgaaaaattttccacatctccttttgtagacacgactaaacattttgcagaaaaaagtttattagtgtttagataatcgtatacttcatcagtgtagatagtaaatgtgaacagataaaaggtattcttgctcaatagattggtaaattccatagaatatattaatcctttcttcttgagatcccacatcatttcaaccagagacgttttatccaatgatttacctcgtactataccacatacaaaactagattttgcagtgacgtcgtacctggtattcctaccaaacaaaattttacttttagttcttttagaaaattctaaggtagaatctctatttgccaatatgtcatctatggaattaccactagcaaaaaatgatagaaatatatattgatacatcgcagctggttttgatctactatactttaaaaacgaatcagattccataattgcctgtatatcatcagctgaaaaactatgttttacacgtattccttcggcatttctttttaatgatatatcttgtttagacaatgataaagttatcatgtccatgagagacgcgtctccgtatcgtataaatatttcattagatgttagacgcttcattaggggtatacttctataaggtttcttaatcagtccatcattggttgcgtcaagaactactatcggatgttgttgggtatctctagtgttacacatggccttactaaagtttgggtaaataactatgatatctctattaattatagatgcatatatttcattcgtcaaggatattagtatcgacttgctatcgtcattaatacgtgtaatgtaatcatataaatcatgcgatagccaaggaaaatttaaatagatgttcatcatataatcgtcgctataattcatattaatacgttgacattgactaatttgtaatatagcctcgccacgaagaaagctctcgtattcagtttcatcgataaaggataccgttaaatataactggttgccgatagtctcatagtctattaagtggtaagtttcgtacaaatacagaatccctaaaatattatctaatgttggattaatctttaccataactgtataaaatggagacggagtcataactattttaccgtttgtacttactggaatagatgaaggaataatctccggacatgctggtaaagacccaaatgtctgtttgaagaaatccaatgttccaggtcctaatctcttaacaaaaattacgatattcgatcccgatatcctttgcattctatttaccagcatatcacgaactatattaagattatctatcatgtctattctcccaccgttatataaatcgcctccgctaagaaacgttagtatatccatacaatggaatacttcatttctaaaatagtattcgttttctaattctttaatgtgaaatcgtatactagaaagggaaaaattatctttgagttttccgttagaaaagaaccacgaaactaatgttctgattgcgtccgattccgttgctgaattaatggatttacaccaaaaactcatataacttctagatgtagaagcattcgctaaaaaattagtagaatcaaaggatataagtagatgttccaacaagtgagcaattcccaagatttcatctatatcattctcgaatccgaaattagaaattcccaagtagatatcctttttcatccgatcgttgatgaaaatacgaactttattcggtaagacaatcatttactaaggagtaaaataggaagtaatgttcgtatgtcgttatcatcgtataaattaaaggtgtgttttttaccattaagtgacattataattttaccaatattggaattataatataggtgtatttgcgcactcgcgacggttgatgcatcggtaaatatagctgtatctaatgttctagtcggtatttcatcatttcgctgtctaataatagcgttttctctatctgtttccattacagctgcctgaagtttattggtcggataatatgtaaaataataagaaatacatacgaataacaaaaataaaataagatataataaagatgccatttagagatctaattttgtttaacttgtccaaattcctacttacagaagatgaggaatcgttggagatagtgtcttccttatgtagaggatttgaaatatcttataatgacttgataacttactttccagataggaaataccataaatatatttataaagtatttgaacatgtagatttatcggaggaattaagtatggaattccatgatacaactctgagagatttagtctatcttagattgtacaagtattccaagtgtatacggccgtgttataaattaggagataatctaaaaggcatagttgttataaaggacaggaatatttatattagggaagcaaatgatgacttgatagaatatctcctcaaggaatacactcctcagatttatacatattctaatgagcgcgtccccataactggttcaaaattaattctttgtggattttctcaagttacatttatggcgtatacaacgtcgcatataacaacaaataaaaaggtagatgttctcgtttccaaaaaatgtatagatgaactagtcgatccaataaattatcaaatacttcaaaatttatttgataaaggaagcggaacaataaacaaaatactcaggaagatattttattcggtaacaggtggccaaactccataggtagctttttctatttcggattttagaatttccaaattcaccagcgatttatcggttttggtgaaatccaaggatttattaatgtccacaaatgccatttgttttgtctgtggattgtatttgaaaatggaaacgatgtagttagatagatgcgctgcgaagtttcctattagggttccgcgcttcacgtcacccagcatacttgaatcaccatcctttaaaaaaaatgataagatatcaacatggagtatatcatactcgaattttaattcttctactgactcactgacattttcacaaatactacaatacggtttaccgaaaataatcagtacgttcttcatttatgggtatcaaaaacttaaaatcgttactgctggaaaataaatcactgacgatattagatgataatttatacaaagtatacaatggaatatttgtggatacaatgagtatttatatagccgtcgccaattgtgtcagaaacttagaagagttaactacggtattcataaaatacgtaaacggatgggtaaaaaagggagggcatgtaaccctttttatcgatagaggaagtataaaaattaaacaagacgttagagacaagagacgtaaatattctaaattaaccaaggacagaaaaatgttagaattagaaaagtgtacatccgaaatacaaaatgttaccggatttatggaagaagaaataaaggcagaaatgcaattaaaaatcgataaactcacatttcaaatatatttatctgattctgataacataaaaatatcattgaatgagatactaacacatttcaacaataatgagaatgttacattattttattgtgatgaacgagacgcagaattcgttatgtgtctcgaggctaaaacacatttctctaccacaggagaatggccgttgataataagtaccgatcaggatactatgctatttgcatctgctgataatcatcctaagatgataaaaaacttaactcaactgtttaaatttgttccctcggcagaggataactatttagcaaaattaacggcgttagtgaatggatgtgatttctttcctggactctatggggcatctataacacccaccaacttaaacaaaatacaattgtttagtgattttacaatcgataatatagtcactagtttggcaattaaaaattattatagaaagactaactctaccgtagacgtgcgtaatattgttacgtttataaacgattacgctaatttagacgatgtctactcgtatattcctccttgtcaatgcactgttcaagaatttatattttccgcattagatgaaaaatggaatgaatttaaatcatcttatttagaaagcgtgccgttaccctgccaattaatgtacgcgttagaaccacgcaaggagattgatgtttcagaagttaaaactttatcatcttatatagatttcgaaaatactaaatcagatatcgatgttataaaatctatatcctcgatcttcggatattctaacgaaaactgtaacacgatagtattcggcatctataaggataatttactactgagtataaataattcattttactttaacgatagtctgttaataaccaatactaaaagtgataatataataaatataggttactagattaaaaatggtgttccaactcgtgtgctctacatgcggtaaagatatttctcacgaacgatataaattgattatacgaaaaaaatcattaaaggatgtactcgtcagtgtaaagaacgaatgttgtaggttaaaattatctacacaaatagaacctcaacgtaacttaacagtgcaacctctattggatataaactaatatggatccggttaattttatcaagacatatgcgcctagaggttctattatttttattaattataccatgtcattaacaagtcatttgaatccatcgatagaaaaacatgtgggtatttattatggtacgttattatcggaacacttggtagttgaatctacctatagaaaaggagttcgaatagtcccattggatagtttttttgaaggatatcttagtgcaaaagtatacatgttagagaatattcaagttatgaaaatagcagctgatacgtcattaactttattgggtattccgtatggatttggtcatgatagaatgtattgttttaaattggtagctgactgttataaaaatgccggtattgatacatcgtctaaacgaatattgggcaaagatatttttctgagccaaaacttcacagacgataatagatggataaagatatatgattctaataatttaacattttggcaaattgattaccttaaagggtgagttaatatgcataactactcctccgttgttttttccctcgttctttttcttaacgttgtttgccatcactctcataatgtaaagatattctaaaatggtaaacttttgcatatcggacgcagaaattggtataaatgttgtaattgtattatttcccgtcaatggactagtcacagctccatcagttttatatcctttagagtatttctcactcgtgtctaacattctagagcattccatgatctgtttatcgttgatattggccggaaagatagattttttattttttattatattactattggcaattgtagatataacttctggtaaatatttttctaccttttcaatctcttctattttcaagccggctatatattctgctatattgttgctagtatcaataccttttctggctaagaagtcatatgtggtattcactatatcagttttaactggtagttccattagcctttccacttctgcagaataatcagaaattggttctttaccagaaaatccagctactataataggctcaccgatgatcattggcaaaatcctatattgtaccagattaatgagagcatatttcatttccaataattctgctagttcttgagacattgatttatttgatgaatctagttggttctctagatactctaccatttctgccgcatacaataacttgttagataaaatcagggttatcaaagtgtttagcgtggctagaatagtgggcttgcatgtattaaagaatgcggtagtatgagtaaaccgttttaacgaattatatagtctccagaaatctgtggcgttacatacatgagccgaatgacatcgaagattgtccaatatttttaatagctgctctttgtccattatttctatatttgactcgcaacaattgtagataccattaatcaccgattcctttttcgatgccggacaatagcacaattgtttagctttggactctatgtattcagaattaatagatatatctctcaatacagattgcactatacattttgaaactatgtcaaaaattgtagaacgacgctgttctgcagccatttaactttaaataatttacaaaaatttaaaatgagcatccgtataaaaatcgataaactgcgccaaattgtggcatatttttcagagttcagtgaagaagtgtctataaatgtagactcgacggatgagttaatgtatatttttgccgccttgggcggatctgtaaacatttgggcaattatacctctaagtgcatcagtgttttaccgaggagccgaaaatattgtgtttaatcttcctgtgtccaaggtaaaatcgtgtttgtgtagttttcacaatgatgccatcatagatatagaacctgatctggaaaataatctagtaaaactttctagttatcatgtagtaagtgtcgattgtaacaaggaactgatgcctattaggacagatactactatttgtctaagtatagatcaaaagaaatcttacgtgtttaattttcacaagtatgaagaaaaatgttgtggtagaaccgtcattcatctagaatggttgttgggctttatcaagtgtattagtcagcatcagcatctggctattatgtttaaagatgacaatattattatgaagactcctggtaatactgatgcgttttccagggaatattctatgactgaatgttctcaagaactacaaaagttttctttcaaaatagctatctcgtctctcaacaaactacgaggattcaaaaagagagtcaatgtttttgaaactagaatcgtaatggataatgacgataacattttaggaatgttgttttcggatagagttcaatcctttaagatcaacatctttatggcgtttttagattaatactttcaatgagataaatatgggtggcggagtaagtgttgagctccctaaacgggatccgcctccgggagtacccactgatgagatgttattaaacgtggataaaatgcatgacgtgatagctcccgctaagcttttagaatatgtgcatataggaccactagcaaaagataaagaggataaagtaaagaaaagatatccagagtttagattagtcaacacaggacccggtggtctttcggcattgttaagacaatcgtataatggaaccgcacccaattgctgtcgcacttttaatcgtactcattattggaagaaggatggaaagatatcagataagtatgaagagggtgcagtattagaatcgtgttggccagacgttcacgacactggaaaatgcgatgttgatttattcgactggtgtcagggggatacgttcgatagaaacatatgccatcagtggatcggttcagcctttaataggagtaatagaactgtagagggtcaacaatcgttaataaatctgtataataagatgcaaacattatgtagtaaagatgctagtgtaccaatatgcgaatcatttttgcattatttacgcgcacacaatacagaagatagcaaagagatgatcgattatattctaagacaacagtctgcggactttaaacagaaatatatgagatgtagttatcccactagagataagttagaagagtcattaaaatatgcggaacctcgagaatgttgggatccagagtgttcgaatgccaatgttaatttcttactaacacgtaattataataatttaggactttgcaatattgtacgatgtaataccagcgtgaacaacttacagatggataaaacttcctcattaagattgtcatgtggattaagcaatagtgatagattttctactgttcccgtcaatagagcaaaagtagttcaacataatattaaacactcgttcgacctaaaattgcatttgatcagtttattatctctcttggtaatatggatactaattgtagctatttaaatgggtgccgcggcaagcatacagacgacggtgaatacactcagcgaacgtatctcgtctaaattagaacaagaagcgaacgctagtgctcaaacaaaatgtgatatagaaatcggaaatttttatatccgacaaaaccatggatgtaacctcactgttaaaaatatgtgctctgcggacgcggatgctcagttggatgctgtgttatcagccgctacagaaacatatagtggattaacaccggaacaaaaagcatacgtgccagctatgtttactgctgcgttaaacattcagacgagtgtaaacactgttgttagagattttgaaaattatgtgaaacagacttgtaattctagcgcggtcgtcgataacaaattaaagatacaaaacgtaatcatagatgaatgttacggagccccaggatctccaacaaatttggaatttattaatacaggatctagcaaaggaaattgtgccattaaagcgttgatgcaattgacgactaaggccactactcaaatagcacctagacaagttgctggtacaggagttcagttttatatgattgttatcggtgttataatattggcagcgttgtttatgtactatgccaagcgtatgttgttcacatccaccaatgataaaatcaaacttattttagccaataaggaaaacgtccattggactacttacatggacacattctttagaacttctccgatggttattgctaccacggatatgcaaaactgaaaatatattgataatattttaatagattaacatggaagttatcgctgatcgtctagacgatatagtgaaacaaaatatagcggatgaaaaatttgtagattttgttatacacggtctagagcatcaatgtcctgctatacttcgaccattaattaggttgtttattgatatactattatttgttatagtaatttatatttttacggtacgtctagtaagtagaaattatcaaatgttgttggtggtgctagtcatcacattaactattttttattactttatactataatagtactagactgacttctaacaaacatctcacctgccataaataaatgcttgatattaaagtcttctatttctaacactattccatctgtggaaaataatactctgacattatcgctaattgacacatcggtgagtgatatgcctataaagtaataatcttctttgggcacatataccagtgtaccaggttctaacaacctatttactggtgctcctgtagcatactttttctttaccttgagaatatccatcgtttgcttggtcaatagcgatatgtgattttttatcaaccactcaaaaaagtaattggagtgttcatatcctctacgggctattgtctcatggccgtgtatgaaatttaagtaacacgactgtggtagatttgttctatagagccgattgccgcaaatagatagaactaccaatatgtctgtacaaatgttaaacattaattgattaacagaaaaaacaatgttcgttctgggaatagaaaccagatcaaaacaaaattcgttagaatatatgccacgtttatacatggaatataaaataactacagtttgaaaaataacagtatcatttaaacatttaacttgcggggttaatctcacaactttactgtttttgaactgttcaaaatatagcatcgatccgtgagaaatacgtttagccgcctttaatagaggaaatcccaccgcctttctggatctcaccaacgacgatagttctgaccagcaactcatttcttcatcatccacctgttttaacatataataggcaggagatagatatccgtcattgcaatattccttctcgtaggcacacaatctaatattgataaaatctccattctcttctctgcatttattatcttgtctcggtggctgattaggctgtggtcttggtttaggccttggtctatcgttgttgaatctattttggtcattaaatctttcatttcttcctggtatatttctatcacctcgtttggttggatttttgtctatattatcgtttgtaacatcggtacgggtattcatttatcacaaaaaaaacttctctaaatgagtctactgctagaaaacctcatcgaagaagataccatattttttgcaggaagtatatctgagtatgatgatttacaaatggttattgccggcgcaaaatccaaatttccaagatctatgctttctatttttaatatagtacctagaacgatgtcaaaatatgagttggagttgattcataacgaaaatatcacaggagcaatgtttaccacaatgtataatataagaaacaatttgggtctaggagatgataaactaactattgaagccattgaaaactatttcttggatcctaacaatgaagttatgcctcttattattaataatacggatatgactgccgtcattcctaaaaaaagtggtaggagaaagaataagaacatggttatcttccgtcaaggatcatcacctatcttgtgcattttcgaaactcgtaaaaagattaatatttataaagaaaatatggaatccgcgtcgactgagtatacacctatcggagacaacaaggctttgatatctaaatatgcgggaattaatgtcctgaatgtgtattctccttccacatccataagattgaatgccatttacggattcaccaataaaaataaactagagaaacttagtactaataaggaactagaatcgtatagttctagccctcttcaagaacccattaggttaaatgattttctgggactattggaatgtgttaaaaagaatattcctctaacagatattccgacaaaggattgattactataaatggagaatgttcctaatgtatactttaatcctgtgtttatagagcccacgtttaaacattctttattaagtgtttataaacacagattaatagttttatttgaagtattcgttgtattcattctaatatatgtattttttagatctgaattaaatatgttcttcatgcctaaacgaaaaatacccgatcctattgatagattacgacgtgctaatctagcgtgtgaagacgataaattaatgatctatggattaccatggatgacaactcaaacatctgcgttatcaataaatagtaaaccgatagtgtataaagattgtgcaaagcttttgcgatcaataaatggatcacaaccagtatctcttaacgatgttcttcgcagatgatgattcattttttaagtatttggctagtcaagatgatgaatcttcattatctgatatattgcaaatcactcaatatctagactttctgttattattattgatccaatcaaaaaataaattagaagctgtgggtcattgttatgaatctctttcagaggaatacagacaattgacaaaattcacagactttcaagattttaaaaaactgtttaacaaggtccctattgttacagatggaagggtcaaacttaataaaggatatttgttcgactttgtgattagtttgatgcgattcaaaaaagaatcctctctagctaccaccgcaatagatcctgttagatacatagatcctcgtcgtgatatcgcattttctaacgtgatggatatattaaagtcgaataaagtgaacaataattaattctttattgtcatcatgaacggcggacatattcagttgataatcggccccatgttttcaggtaaaagtacagaattaattagacgagttagacgttatcaaatagctcaatataaatgcgtgactataaaatattctaacgataatagatacggaacgggactatggacgcatgataagaataattttgaagcattggaagcaactaaactatgtgatgtcttggaatcaattacagatttctccgtgataggtatcgatgaaggacagttctttccagacattgtttaattctgtgagcgtatggcaaacggtaccgagctcaaaaattgaaaaactagcgtctttttttgctcgaagtcgacgccaccatgcttctggcgcggatgaacccgcaggtgcagcccgagaacaacggggcggacacgggtccagagcagccccttcgggcgcgcaaaactgcggagctgctggtggtgaaggagcgcaacggcgtccagtgcctgctggcgccccgcgacggcgacgcgcagccccgggagacctggggcaagaagatcgacttcctgctgtccgtagtcggcttcgcagtggacctggccaacgtgtggcgcttcccctacctctgctacaagaacggcggcggtgccttcttgatcccgtacacactgttccttatcatcgcggggatgcccctgttctacatggagctggctctgggacagtacaaccgggagggggctgccaccgtttggaaaatctgcccattcttcaaaggcgttggctatgctgtcatcctgatcgccctgtacgttggcttctactacaacgtcatcatcgcctggtcactctactacctcttctcctccttcaccctcaacctgccctggaccgactgtggccacacctggaacagccccaactgtaccgaccccaagctcctcaatggctccgtgcttggcaaccacaccaagtactccaagtacaagttcacgccggcagccgagttttatgagcgtggtgtcctgcaccttcacgagagcagcgggattcatgacatcggcctgccccagtggcagctcttgctctgtctgatggtcgtcgtcatcgtcttgtattttagcctctggaaaggggtgaagacatcaggaaaggtggtgtggatcacagccacgctgccttacttcgtgctgttcgtgctcctggtccatggcgtcacgctgcccggagcctccaatggcatcaatgcctacctgcacatcgacttctaccgcttgaaagaggccacggtatggattgatgccgcaactcagatatttttttccttgggggctggatttggagtattgattgcatttgccagttacaacaaatttgacaacaactgttacagggatgccctgctgaccagcagcatcaactgtatcaccagcttcgtctctgggttcgccatcttctccatccttggttacatggcccatgaacacaaggtcaacattgaggatgtggccacagaaggagctggcctagtgttcatcctgtatccagaggccatttctaccctgtctggatctacattctgggctgttgtgtttttcgtcatgctcctggcgctgggccttgacagctcaatgggaggcatggaggctgtcatcacgggcctggcagatgacttccaggtcctgaagcgacaccggaaactcttcacatttggcgtcaccttcagcactttccttctcgccctgttctgcataaccaagggtggaatttacgtcttgaccctcctggacacctttgctgcgggcacctccatcctttttgctgtcctcatggaagccatcggagtttcctggttttatggagtggacaggttcagcaacgacatccagcagatgatggggttcaggccgggtctatactggagactgtgctggaagttcgtcagtcctgccttcctcctgttcgtggttgtggtcagcatcatcaacttcaagccactcacctacgacgactacatcttcccgccctgggccaactgggtggggtggggcatcgccctgtcctccatggtcctggtgcccatctacgtcatctataagttcctcagcacgcagggctctctttgggagagactggcctatggcatcacgccagagaacgagcaccacctggtggctcagagggacatcagacagttccagttgcaacactggctggccatctgagatgggtaattaattaatttttatcgatctaattcaacaatgtctggagagctcggatccttctgtgagcgtatggcaaacgaaggaaaaatagttatagtagccgcactcgatgggacatttcaacgtaaaccgtttaataatattttgaatcttattccattatctgaaatggtggtaaaactaactgctgtgtgtatgaaatgctttaaggaggcttccttttctaaacgattgggtgaggaaaccgagatagagataataggaggtaatgatatgtatcaatcggtgtgtagaaagtgttacgtcggctcataatattatattttttatctaaaaaactaaaaataaacattgattaaattttaatataatacttaaaaatggatgttgtgtcgttagataaaccgtttatgtattttgaggaaattgataatgagttagattacgaaccagaaagtgcaaatgaggtcgcaaaaaaactgccgtatcaaggacagttaaaactattactaggagaattattttttcttagtaagttacagcgacacggtatattagatggtgccaccgtagtgtatataggatctgctcccggtacacatatacgttatttgagagatcatttctataatttaggagtgatcatcaaatggatgctaattgacggccgccatcatgatcctattttaaatggattgcgtgatgtgactctagtgactcggttcgttgatgaggaatatctacgatccatcaaaaaacaactgcatccttctaagattattttaatttctgatgtgagatccaaacgaggaggaaatgaacctagtacggcggatttactaagtaattacgctctacaaaatgtcatgattagtattttaaaccccgtggcgtctagtcttaaatggagatgcccgtttccagatcaatggatcaaggacttttatatcccacacggtaataaaatgttacaaccttttgctccttcatattcagctgaaatgagattattaagtatttataccggtgagaacatgagactgactcgagttaccaaattagacgctgtaaattatgaaaaaaagatgtactaccttaataagatcgtccgtaacaaagtagttgttaactttgattatcctaatcaggaatatgactattttcacatgtactttatgctgaggaccgtgtactgcaataaaacatttcctactactaaagcaaaggtactatttctacaacaatctatatttcgtttcttaaatattccaacaacatcaactgaaaaagttagtcatgaaccaatacaacgtaaaatatctagcaaaaattctatgtctaaaaacagaaatagcaagagatccgtacgcggtaataaatagaaacgtactactgagatatactaccgatatagagtataatgatttagttactttaataaccgttagacataaaattgattctatgaaaactgtgtttcaggtatttaacgaatcatccataaattatactccggttgatgatgattatggagaaccaatcattataacatcgtatcttcaaaaaggtcataacaagtttcctgtaaattttctatacatagatgtggtaatatctgacttatttcctagctttgttagactagatactacagaaactaatatagttaatagtgtactacaaacaggcgatggtaaaaagactcttcgtcttcccaaaatgttagagacggaaatagttgtcaagattctctatcgccctaatataccattaaaaattgttagatttttccgcaataacatggtaactggagtagagatagccgatagatctgttatttcagtcgctgattaatcaattagtagagatgagataagaacattataataatcaataatatatcttatatcttatatcttatatcttatatcttgtttagaaaaatgctaatattaaaatagctaacgctagtaatccaatcggaagccatttgatatctataatagggtatctaatttcctgatttaaatagcggacagctatattctcggtagctactcgtttggaatcacaaacattatttacatctaatttactatctgtaatggaaacgtttcccaatgaaatggtacaatccgatacattgcattttgttatatttttttttaaagaggctggtaacaacgcatcgcttcgtttacatggctcgtaccaacaataatagggtaatcttgtatctattcctatccgtactatgcttttatcaggataaatacatttacatcgtatatcgtctttgttagcatcacagaatgcataaatttgttcgtccgtcatgataaaaatttaaagtgtaaatataactattatttttatagttgtaataaaaagggaaatttgattgtatactttcggttctttaaaagaaactgacttgataaaaatggctgtaatctctaaggttacgtatagtctatatgatcaaaaagagattaatgctacagatattatcattagtcatgttaaaaatgacgacgatatcggtaccgttaaagatggtagactaggtgctatggatggggcattatgtaagacttgtgggaaaacggaattggaatgtttcggtcactggggtaaagtaagtatttataaaactcatatagttaagcctgaatttatttcagaaattattcgtttactgaatcatatatgtattcactgcggattattgcgttcacgagaaccgtattccgacgatattaacctaaaagagttatcgggacacgctcttaggagattaaaggataaaatattatccaagaaaaagtcatgttggaacagtgaatgtatgcaaccgtatcaaaaaattactttttcaaagaaaaaggtttgtttcgtcaacaagttggatgatattaacgttcctaattctctcatctatcaaaagttaatttctattcatgaaaagttttggccattattagaaattcatcaatatccagctaacttattttatacagactactttcccatccctccgttgattattagaccggctattagtttttggatagatagtatacccaaagagaccaatgaattaacttacttattaggtatgatcgttaagaattgtaacttgaatgctgatgaacaggttatccagaaggcggtaatagaatacgatgatattaaaattatttctaataacactaccagtatcaatttatcatatattacatccggcaaaaataatatgattagaagttatatcgtcgcccgacgaaaagatcagaccgctagatctgtaattggtcccagtacatctatcaccgttaatgaggtaggaatgcccgcatatattagaaatacacttacagaaaagatatttgttaatgcctttacagtggataaagttaaacaactattagcgtcaaaccaagttaaattttactttaataaacgattaaaccaattaacaagaatacgccaaggaaagtttattaaaaataaaatacatttattgcctggtgattgggtagaagtagctgttcaagaatatacaagtattatttttggaagacagccgtctctacatagatacaacgtcatcgcttcatctatcagagctaccgaaggagatactatcaaaatatctcccggaattgccaactctcaaaatgctgatttcgacggggatgaggaatggatgatattagaacaaaatcctaaagctgtaattgaacaaagtattcttatgtatccgacgacgttactcaaacacgatattcatggagcccccgtttatggatctattcaagatgaaatcgtagcagcgtattcattgtttaggatacaagatctttgtttagatgaagtattgaacatcttggggaaatatggaagagagttcgatcctaaaggtaaatgtaaattcagcggtaaagatatctatacttacttgataggtgaaaagattaattatccgggtctcttaaaggatggtgaaattattgcaaacgacgtagatagtaattttgttgtggctatgaggcatctgtcattggctggactcttatccgatcataagtcgaacgtggaaggtatcaactttattatcaagtcatcttatgtttttaagagatatctatctatttacggttttggggtgacattcaaagatctgagaccaaattcgacgttcactaataaattggaggccatcaacgtagaaaaaatagaacttatcaaagaagcatacgccaaatatctcaacgatgtaagagacgggaaaatagttccattatctaaagctttagaggcggactatgtggaatccatgttatccaacttgacaaatcttaatatccgagagatagaagaacatatgagacaaacgctgatagatgatccagataataacctcctgaaaatggccaaagcgggttataaagtaaatcccacagaactaatgtatattctaggtacgtatggacaacaaaggattgatggtgaaccagcagagactcgagtattgggtagagttttaccttactatcttccagactctaaggatccagaaggaagaggttacattcttaattctttaacaaaaggattaacgggttctcaatattacttttcgatgctggttgccagatctcaatctactgatatcgtctgtgaaacatcacgtaccggaacactggctagaaaaatcattaaaaagatggaggatatggtggtcgacggatacggacaagtagttataggtaatacgctcatcaagtacgccgccaattataccaaaattctaggctcagtatgtaaacctgtagatcttatctatccagatgagtccatgacttggtatttggaaattagtgctctgtggaataaaataaaacagggattcgtttactctcagaaacagaaacttgcaaagaagacattggcgccgtttaatttcctagtattcgtcaaacccaccactgaggataatgctattaaggttaaggatctgtacgatatgattcataacgtcattgatgatgtgagagagaaatacttctttacggtatctaatatagattttatggagtatatattcttgacgcatcttaatccttctagaattagaattacaaaagaaacggctatcactatctttgaaaagttctatgaaaaactcaattatactctaggtggtggaactcctattggaattatttctgcacaggtattgtctgagaagtttacacaacaagccctgtccagttttcacactactgaaaaaagtggtgccgtcaaacaaaaacttggtttcaacgagtttaataacttgactaatttgagtaagaataagaccgaaattatcactctggtatccgatgatatctctaaacttcaatctgttaagattaatttcgaatttgtatgtttgggagaattaaatccaaacatcactcttcgaaaagaaacagataaatatgtagtagatataatagtcaatagattatacatcaagagagcagaaataaccgaattagtcgtcgaatatatgattgaacgatttatctcctttagcgtcattgtaaaggaatggggtatggagacattcattgaggacgaggataatattagatttactgtctacctaaatttcgttgaaccggaagaattgaatcttagtaagtttatgatggttcttccgggggcagccaacaagggaaagattagtaaattcaagattcctatctctgattatacgggatatgacgacttcaatcaaacaaaaaagctcaataagatgactgtagaactcatgaatctaaaagaattgggttctttcgatttggaaaacgtcaacgtgtatcctggagtatggaatacatacgatatcttcggtatcgaggccgctcgtgaatacttgtgcgaagccatgttaaacacctatggagaagggttcgattatctgtatcagccttgtgatcttctcgctagtttactatgtgctagttacgaaccagaatcagtgaataaattcaagttcggcgcagctagtactcttaagagagctacgttcggagacaataaagcattgttaaacgcggctcttcataaaaagtcagaacctattaacgataatagtagctgccacttttttagcaaggtccctaatataggaactggatattacaaatactttatcgacttgggtcttctcatgagaatggaaaggaaactatctgataagatatcttctcaaaagatcaaggaaatggaagaaacagaagacttttaattcttatcaataacatatttttctatgatctgtcttttaaacgatggattttccacaaatgcgcctctcaagtccctcatagaatgatacacgtataaaaaatatagcataggcaatgactccttatttttagacattagatatgccaaaatcatagccccgcttctatttactcccgcagcacaatgaaccaacacgggctcgtttcgttgatcacatttagataaaaaggcggttacgtcgtcaaaatatttactaatatcggtagttgtatcatctaccaacggtatatgaataatattaatattagagttaggtaatgtatatttatccatcgtcaaatttaaaacatatttgaacttaacttcagatgatggtgcatccatagcatttttataatttcccaaatacacattattggttacccttgtcattatagtgggagatttggctttgtgcatatctccagttgaacgtagtagtaagtatttatacaaacttttcttatccatttataacgtacaaatggataaaactactttatcggtaaacgcgtgtaatttagaatacgttagagaaaaggctatagtaggcgtacaagcagccaaaacatcaacacttatattctttgttattatattggcaattagtgcgctattactctggtttcagacgtctgataatccagtctttaatgaattaacgagatatatgcgaattaaaaatacggttaacgattggaaatcattaacggatagcaaaacaaaattagaaagtgatagaggtagacttctagccgctggtaaggatgatatatttgaattcaaatgtgtggatttcggcgcctattttatagctatgcgattggataagaaaacatatctgccgcaagctattaggcgaggtactggagacgcgtggatggttaaaaaggcggcaaaggtcgatccatctgctcaacaattttgtcagtatttgataaaacacaagtctaataatgttattacttgtggtaatgagatgttaaatgaattaggttatagcggttattttatgtcaccgcattggtgttccgattttagtaatatggaatagtgttagataaatgcggtaacgaatgttcctgtaaggaaccataacagcttagatttaacgttaaagatgagcataaacataataaacaaaattacaatcaaacttataacattaatatcaaacaatccaaaaaatgaaatcagtggagtagtaaacgcgtacataactcctggataacgtttagcagctgccgttcctattctagaccaaaaattcggtttcatgttttcgaaacggtattctgcaacaagtcgaggatcgtgttctacatatttggcggcattatccagtatctgcctattgatcttcatttcgttttcgattctggctatttcaaaataaaatcccgatgatagacctccagactttataatttcatctacgatgttcagcgccgtagtaactctaataatataggctgataagctaacatcataccctcctgtatatgtgaatatggcatgatttttgtccattacaagctcggttttaactttattgcctgtaataatttctctcatctgtaggatatctatttttttgtcatgcattgccttcaagacgggacgaagaaacgtaatatcctcaataacgttatcgttttctacaataactacatattctacctttttattttctaactcggtaaaaaaattagaatcccatagggctaaatgtctagcgatatttcttttcgtttcctctgtacacatagtgttacaaaaccctgaaaagaagtgagtatacttgtcatcatttctaatgtttcctccagtccactgtataaacgcataatccttgtaatgatctggatcatccttgactaccacaacatttcttttttctggcataacttcgttgtcctttacatcatcgaacttctgatcattaatatgctcatgaacattaggaaatgtttctgatggaggtctatcaataactggcacaacaataacaggagttttcaccgccgccatttagttattgaaattaatcatatacaactctttaatacgagttatattttcgtctatccattgtttcacattgacatatttcgacaaaaagatataaaatgcgtattccaatgcttctctgtttaatgaattactaaaatatacaaacacgtcactgtctggcaataaatgatatcttagaatattgtaacaatttattttgtattgcacatgttcgtgatctatgagttcttcttcgaatggcataggatctccgaatctgaaaacgtataaataggagttagaataataatatttgagagtattggtaatatataaactctttagcggtataattagtttttttctctcaatttctatttttagatgtgatggaaaaatgactaattttgtagcattagtatcatgaactctaatcaaaatcttaatatcttcgtcacacgttagctctttgaagtttttaagagatgcatcagttggttctacagatggagtaggtgcaacaattttttgttctacacatgtatgtactggagccattgttttaactataatggtgcttgtatcgaaaaactttaatgcagatagcggaagctcttcgccgcgactttctacgtcgtaattgggttctaacgccgatctctgaatggatactagttttctaagttctaatgtgattctctgaaaatgtaaatccaattcctccggcattatagatgtgtatacatcggtaaataaaactatagtatccaacgatcccttctcgcaaattctagtcttaaccaaaaaatcgtatataaccacggagatggcgtatttaagagtggattcttctaccgttttgttcttggatgtcatataggaaactataaagtccgcactactgttaagaatgattactaacgcaactatatagtttaaattaagcattttggaaacataaaataactctgtagacgatacttgactttcgaataagtttgcagacaaacgaagaaagaacagacctctcttaatttcagaagaaaactttttttcgtattcctgacgtctagagtttatatcaataagaaagttaagaattagtcggttaatgttgtatttcattacccaagtttgagatttcataatattatcaaaagacatgataatattaaagataaagcgctgactatgaacgaaatagctatatggttcgctcaagaatatagtcttgttaaacgtggaaacgataactgtatttttaatcacgtcagcggcatctaaattaaatataggtatatttattccacacactctacaatatgccacaccatcttcataataaataaattcgttagcaaaattattaattttagtgaaatagttagcgtcaactttcatagcttccttcaatctaatttgatgctcacacggtgcgaattccactctaacatcccttttccatgcctcaggttcatcgatctctataatatctagttttttgcgtttcacaaacacaggctcgtctctcgcgatgagatctgtatagtaactatgtaaatgataactagatagaaagatgtagctatatagatgacgatcctttaagagaggtataataactttaccccaatcagatagactgttgttatggtcttcggaaaaagaatttttataaatttttccagtattttccaaatatacgtacttaacatctaaaaaatccttaatgataataggaatggataatccgtctattttataaagaaatacatatcgcacattatacttttttttggaaatgggaataccgatgtgtctacataaatatgcaaagtctaaatattttttagagaatcttagttggtccaaattcttttccaagtacggtaatagatttttcatattgaacggtatcttcttaatctctggttctagttccgcattaaatgatgaaactaagtcactatttttataactaacgattacatcacctctaacatcatcatttaccagaatactgatcttcttttgtcgtaaatacatgtctaatgtgttaaaaaaaagatcatacaagttatacgtcatttcatctgtggtattcttgtcattgaaggataaactcgtactaatctcttctttaacagcctgttcaaatttatatcctatatacgaaaaaatagcaaccagtgtttgatcatccgcgtcaatattctgttctatcgtagtgtataacaatcgtatatcttcttctgtgatagtcgatacgttataaaggttgataacgaaaatatttttatttcgtgaaataaagtcatcgtaggattttggacttatattcgcgtctagtagatatgcttttatttttggaatgatctcaattagaatagtctctttagagtccatttaaagttacaaacaactaggaaattggtttatgatgtataatttttttagtttttatagattctttattctatacttaaaaaatgaaaataaatacaaaggttcttgagggttgtgttaaattgaaagcgagaaataatcataaattatttcattatcgcgatatccgttaagtttgtatcgtaatggcgtggtcaattacgaataaagcggatactagtagcttcacaaagatggctgaaatcagagctcatctaaaaaatagcgctgaaaataaagataaaaacgaggatattttcccggaagatgtaataattccatctactaagcccaaaaccaaacgagccactactcctcgtaaaccagcggctactaaaagatcaaccaaaaaggaggaagtggaagaagaagtagttatagaggaatatcatcaaacaactgaaaaaaattctccatctcctggagtcagcgacattgtagaaagcgtggccgctgtagagctcgatgatagcgacggggatgatgaacctatggtacaagttgaagctggtaaagtaaatcatagtgctagaagcgatctctctgacctaaaggtggctaccgacaatatcgttaaagatcttaagaaaattattactagaatctctgcagtatcgacggttctagaggatgttcaagcagctggtatctctagacaatttacttctatgactaaagctattacaacactatctgatctagtcaccgagggaaaatctaaagttgttcgtaaaaaagttaaaacttgtaagaagtaaatgcgtgcacttttttataaagatggtaaactctttaccgataataattttttaaatcctgtatcagacgataatccagcgtatgaggttttgcaacatgttaaaattcctactcatttaacagatgtagtagtatatgaacaaacgtgggaggaggcgttaactagattaatttttgtgggaagtgattcaaaaggacgtagacaatacttttacggaaaaatgcatgtacagaatcgcaacgctaaaagagatcgtatttttgttagagtatataacgttatgaaacgaattaattgttttataaacaaaaatataaagaaatcgtccacagattccaattatcagttggcggtttttatgttaatggaaactatgttttttattagatttggtaaaatgaaatatcttaaggagaatgaaacagtagggttattaacactaaaaaataaacacatagaaataagtcccgatgaaatagttatcaagtttgtaggaaaggacaaagtttcacatgaatttgttgttcataagtctaatagactatataaaccgctattgaaactgacggatgattctagtcccgaagaatttctgttcaacaaactaagtgaacgaaaggtatacgaatgtatcaaacagtttggtattagaatcaaggatctccgaacgtatggagtcaattatacgtttttatataatttttggacaaatgtaaagtccatatctcctcttccgtcaccaaaaaagttaatagcattaactatcaaacaaactgctgaagtggtaggtcatactccatcaatttcaaaaagagcttatatggcaacgactattttagaaatggtaaaggataaaaattttttagatgtagtatctaaaactacgttcgatgaattcctatctatagtcgtagatcacgttaaatcatctacggatggatgatatagatctttacacaaataattacaagaccgataaatggaaatggataagcgtatgaaatctctcgcaatgacagctttcttcggagagctaagcacattagatattatggcattgataatgtctatatttaaacgccatccaaacaataccattttttcagtggataaggatggtcagtttatgattgatttcgaatacgataattataaggcttctcaatatttggatctgaccctcactccgatatctggagatgaatgcaagactcacgcatcgagtatagccgaacaattggcgtgtgcggatattattaaagaggatattagcgaatatatcaaaactactccccgtcttaaacgatttataaaaaaataccgcaatagatcagatactcgtatcagtcgagatacagaaaagcttaaaatagctctagctaaaggcatagattacgaatatataaaagacgcttgttaataagtaaatgaaaaaaaactagtcgtttataataaaacacgatatggatgccaacgtagtatcattttctactattgcgacgtatatagacgctttagcgaagaatgcttcggaattagaacagaggtctaccgcatacgaaataaataatgaattggaactagtatttattaagccgccattgattactttgacaaatgtagtgaatatctctacgattcaggaatcgtttattcgatttaccgttactaataaggaaggtgttaaaattagaactaagattccattatctaaggtacatggtctagatgtaaaaaatgtacagttagtagatgctatagataacatagtttgggaaaagaaatcattagtgacggaaaatcgtcttcacaaagaatgcttgttgagactatcgacagaggaacgtcatatatttttggattacaagaaatatggatcctctatccgactagaattagtcaatcttattcaagcaaaaacaaaaaactttacgatagactttaagctaaaatattttctaggatccggtgcccagtctaaaagttctttgttgcacgctattaatcatccaaagtcaaggcctaatacatctctggaaatagaattcacacctagagacaatgaaacagttccatatgatgaactaataaaggaattgacgactctctcgcgtcatatatttatggcttctccagagaatgtaattctttctccgcctattaacgcgcctataaaaacctttatgttgcctaaacaagatatagtaggtttggatctggaaaatctatatgccgtaactaagactgacggcattcctataactatcagagttacatcaaacgggttgtattgttattttacacatcttggttatattattagatatcctgttaagagaataatagattccgaagtagtagtctttggtgaggcagttaaggataagaactggaccgtatatctcattaagctaatagagcctgtgaatgcaatcaatgatagactagaagaaagtaagtatgttgaatctaaactagtggatatttgtgatcggatagtattcaagtcaaagaaatacgaaggtccgtttactacaactagtgaagtcgtcgatatgttatctacatatttaccaaagcaaccagaaggtgttattctgttctattcaaagggacctaaatctaacattgattttaaaattaaaaaggaaaatactatagaccaaactgcaaatgtagtatttaggtacatgtccagtgaaccaattatctttggagaatcgtctatctttgtagagtataagaaatttagcaacgataaaggctttcctaaagaatatggttctggtaagattgtgttatataacggcgttaattatctaaataatatctattgtttggaatatattaatacacataatgaagtgggtattaagtccgtggttgtacctattaagtttatagcagaattcttagttaatggagaaatacttaaacctagaattgataaaaccatgaaatatattaactcagaagattattatggaaatcaacataatatcatagtcgaacatttaagagatcaaagcatcaaaataggagatatctttaacgaggataaactatcggatgtgggacatcaatacgccaataatgataaatttagattaaatccagaagttagttattttacgaataaacgaactagaggaccgttgggaattttatcaaactacgtcaagactcttcttatttctatgtattgttccaaaacatttttagacgattccaacaaacgaaaggtattggcgattgattttggaaacggtgctgacctggaaaaatacttttatggagagattgcgttattggtagcgacggatccggatgctgatgctatagctagaggaaatgaaagatacaacaaattaaactctggaattaaaaccaagtactacaaatttgactacattcaggaaactattcgatccgatacatttgtctctagtgtcagagaagtattctattttggaaagtttaatatcatcgactggcagtttgctatccattattcttttcatccgagacattatgctaccgtcatgaataacttatccgaactaactgcttctggaggcaaggtattaatcactaccatggacggagacaaattatcaaaattaacagataaaaagacttttataattcataagaatttacctagtagcgaaaactatatgtctgtagaaaaaatagctgatgatagaatagtggtatataatccatcaacaatgtctactccaatgactgaatacattatcaaaaagaacgatatagtcagagtgtttaacgaatacggatttgttcttgtagataacgttgatttcgctacaattatagaacgaagtaaaaagtttattaatggcgcatctacaatggaagatagaccgtctacaaaaaactttttcgaactaaatagaggagccattaaatgtgaaggtttagatgtcgaagacttacttagttactatgttgtttatgtcttttctaagcggtaaataataatatggtatgggttctgatctcccagttctaaatgcattaaataattccaatagagcgatttttgttcctataggaccttccaactgtggatactctgtattgttaatagatatattaatacttttgtcgggtaacagaggttctacgtcttctaaaaataaaagttttataacatctggcctgttcataaataaaaacttggcgattctatatatactcttattatcaaatctagccattgtcttatagatgtgagctactgtaggtgtaccatttgattttctttctaatactatatatttctctcgaagaagttcttgcacatcatctgggaataaaatactactgttgagtaaatcagttattttttttatatcgatattgatggacatttttatagttaaggataataagtatcccaaagtcgataacgacgataacgaagtatttatacttttaggaaatcacaatgactttatcagattaaaattaacaaaattaaaggagcatgtatttttttctgaatatattgtgactccagatacatatggatctttatgcgtcgaattaaatgggtctagttttcagcacggcggtagatatatagaggtggaggaatttatagatgctggaagacaagttagatggtgttctacatccaatcatatatctaaagatatacccgaagatatgcacactgataaatttgtcatttatgatatttatacgtttgattcgttcaagaataaacgattggtattcgtacaggtacctccgtcgttaggagatgatagtcatttgactaatccgttattgtcaccgtattatcgtaattcagtagccagacaaatggtcaatgatatgatttttaatcaagattcatttttaaaatatttattagaacatctgattagaagccactatagagtttctaaacatataacaatagttagatacaaggataccgaagaattaaatctaacgagaatatgttataatagagataagtttaaggcgtttgtattcgcttggtttaacggcgtttcggaaaatgaaaaggtactagatacgtataaaaaggtatctaatttgatataatgaattcagtgactgtatcacacgcgccatatactattacttatcacgatgattgggaaccagtaatgagtcaattggtagagttttataacgaagtagccagttggctgctacgagacgagacgtcgcctattcctgataagttctttatacagttgaaacaaccgcttagaaataaacgagtatgtgtgtgtggtatagatccgtatccgaaagatggaactggtgtaccgttcgaatcaccaaattttacaaaaaaatcaattaaggagatagcttcatctatatctagattaaccggagtaattgattataaaggttataaccttaatataatagacggggttataccctggaattattacttaagttgtaaattaggagaaacaaaaagtcacgcgatttactgggataagatttccaagttactgctgcagcatataactaaacacgttagtgttctttattgtttgggtaaaacagatttctcgaatatacgggccaagttagaatccccggtaactaccatagtcggatatcatccagcggctagagaccgccaattcgagaaagatagatcatttgaaattatcaacgttttactggaattagacaacaaggcacctataaattgggctcaagggtttatttattaatgctttagtgaaattttaacttgtgttctaaatggatgcggctattagaggtaatgatgttatctttgttcttaagactataggtgtcccgtcagcgtgcagacaaaatgaagatccaagatttgtagaagcatttaaatgcgacgagttagaaagatatattgagaataatccagaatgtacactattcgaaagtcttagggatgaggaagcatactctatagtcagaattttcatggatgtagatttagacgcgtgtctagacgaaatagattatttaacggccattcaagattttattatcgaggtgtcaaactgtgtagctagattcgcgtttacagaatgcggcgccattcatgaaaatgtaataaaatccatgagatctaatttttcattgactaagtctacaaatagagataaaacaagttttcatattatctttttagatacgtataccactatggatacattgatagctatgaaacgaacactattagaattaagtagatcatctgaaaatccactaaccagatcgatagacactgccgtatataggagaaaaacaactcttcgggttgtaggtactaggaaaaatccaaattgcgacactattcatgtaatgcaaccaccgcatgataatatagaagattacctattcacttacgtggatatgaacaacaatagttattacttttctctacaacaacgattggaggatttagttcctgataagttatgggaaccagggtttatttcattcgaagacgctataaaaagagtttcaaaaatattcattaattctataataaactttaatgatctcgatgaaaataattttacaacggtaccactggtcatagattacgtaacaccttgtgcattatgtaaaaaacgatcgcataaacatccgcatcaactatcgttggaaaatggtgctattagaatttacaaaactggtaatccacatagttgtaaagttaaaattgttccgttggatggtaataaactgtttaatattgcacaaagaattttagacactaactctgttttattaaccgaacgaggagaccatatagtttggattaataattcatggaaatttaacagcgaagaacccttgataacaaaactaattttgtcaataagacatcaactacctaaggaatattcaagcgaattactctgtccaagaaaacgaaagactgtagaagctaacatacgagacatgttagtagattcagtggagaccgatacctatccggataaacttccgtttaaaaatggtgtattggacctggtagacggaatgttttactctggagatgatgctaaaaaatatacgtgtactgtatcaaccggatttaaatttgacgatacaaagttcgtcgaagacagtccagaaatggaagagttaatgaatatcattaacgatatccaaccattaacggatgaaaataagaaaaatagagagctatatgaaaaaacattatctagttgtttatgcggtgctaccaaaggatgtttaacattcttttttggagaaactgcaactggaaagtcgacaaccaaacgtttgttaaagtctgctatcggtgacctgtttgttgagacgggtcaaacaattttaacagatgtattggataaaggacctaatccatttatcgctaacatgcatttgaaaagatctgtattctgtagcgaactacctgattttgcctgtagtggatcaaagaaaattagatctgacaatattaaaaagttgacagaaccttgtgtcattggaagaccgtgtttctccaataaaattaataatagaaaccatgcgacaatcattatcgatactaattacaaacctgtttttgataggatagataacgcattaatgagaagaattgccgtcgtgcgattcagaacacacttttctcaaccttctggtagagaggctgctgaaaataatgacgcgtacgataaagtcaaactattagacgaggggttagatggtaaaatacaaaataatatatatagatttgcatttctatacttgttggtgaaatggtacaaaaaatatcatgttcctattatgaaactatatcctacacccgaagagattcctgactttgcattctatctcaaaataggtactctgttggtatctagctctgtaaagcatattccattaatgacggacctctccaaaaagggatatatattgtacgataatgtggtcactcttccgttgactactttccaacagaaaatatccaagtattttaattctagactatttggacacgatatagagagcttcatcaatagacataagaaatttgccaatgttagtgatgaatatctgcaatatatattcatagaggatatttcatctccgtaaatatatgctcatatatttatagaagatatcacatatctaaatgaataccggaatcatagatttatttgataatcatgttgatagtataccaactatattacctcatcagttagctactctagattatctagttagaactatcatagatgagaacagaagcgtgttattgttccatattatgggatcaggtaaaacaataatcgctttgttgttcgccttggtagcttccagatttaaaaaggtttacattctagtgccgaacatcaacatcttaaaaattttcaattataatatgggtgtagctatgaacttgtttaatgacgaattcatagctgagaatatctttattcattccacaacaagtttttattctcttaattataacgataacgtcattaattataacggattatctcgctacaataactctatttttatcgttgatgaggcacataatatctttgggaataatactggagaacttatgaccgtgataaaaaataaaaacaagattccttttttactattgtctggatctcccattactaacacacctaatactctgggtcatattatagatttaatgtccgaagagacgatagattttggtgaaattattagtcgtggtaagaaagtaattcagacacttcttaacgaacgcggtgtgaatgtacttaaggatttgcttaaaggaagaatatcatattacgaaatgcctgataaagatctaccaacgataagatatcacggacgtaagtttctagatactagagtagtatattgtcacatgtctaaacttcaagagagagattatatgattactagacgacagctatgttatcatgaaatgtttgataaaaatatgtataacgtgtcaatggcagtattgggacaacttaatctgatgaataatttagatactttatttcaggaacaggataaggaattgtacccaaatctgaaaataaataatggcgtgttatacggagaagaattggtaacgttaaacattagttccaaatttaaatactttattaatcggatacagacactcaacggaaaacattttatatacttttctaattctacatatggcggattggtaattaaatatatcatgctcagtaatggatattctgaatataatggttctcagggaactaatccacatatgataaacggcaaaccaaaaacatttgctatcgttactagtaaaatgaaatcgtctttagaggatctattagatgtgtataattctcctgaaaacgatgatggtagtcaattgatgtttttgttttcatcaaacattatgtccgaatcctatactctaaaagaggtaaggcatatttggtttatgactatcccagatactttttctcaatacaaccaaattcttggacgatctattagaaaattctcttacgccgatatttctgaaccagttaatgtatatcttttagccgccgtatattccgatttcaatgacgaagtgacgtcattaaacgattacacacaggatgaattaattaatgttttaccatttgacatcaaaaagctgttgtatctaaaatttaagacgaaagaaacgaatagaatatactctattcttcaagagatgtctgaaacgtattctcttccaccacatccatcaattgtaaaagttttattgggagaattggtcagacaatttttttataataattctcgtattaagtataacgataccaagttacttaaaatggttacatcagttataaaaaataaagaagacgctaggaattacatagatgatattgtaaacggtcacttctttgtatcgaataaagtatttgataaatctcttttatacaaatacgaaaacgatattattacagtaccgtttagactttcctacgaaccatttgtttggggagttaactttcgtaaagaatataacgtggtatcttctccataaaactgatgagatatataaagaaataaatgtcgagctttgttaccaatggatacctttccgttacattggaaccacacgagctgacgttagacataaaaactaatattaggaatgccgtatataagacgtatctccatagagaaattagtggtaaaatggccaagaaaatagaaattcgtgaagacgtggaattacctctcggcgaaatagttaataattctgtagttataaacgttccgtgtgtaataacctacgcgtattatcacgttggggatatagtcagaggaacattaaacatcgaagatgaatcaaatgtaactattcaatgtggagatttaatctgtaaactaagtagagattcgggtactgtatcatttagcgattcaaagtactgcttttttcgaaatggtaatgcgtatgacaatggcagcgaagtcactgccgttctaatggaggctcaacaaggtatcgaatctagttttgtttttctcgcgaatatcgtcgactcataaaaaagagaatagcggtaagtataaacacgaatactatggcaataattgcgaatgttttattctcttcgatatatttttgataatatgaaaaacatgtctctctcaaatcggacaaccatctcataaaatagttctcgcgcgctggagaggtagttgccgctcgtataatctctccagaataatatacttgcgtgtcgtcgttcaatttatacggatttctatagttctctgttatataatgcggtttgccctcatgattagacgacgacaatagtgttctaaatttagatagttgatcagaatgaatgtttattggcgttggaaaaattatccatacagcgtctgcagagtggttgatagttgttcctagatatgtaaaataatccaacttactaggcagcaaattgtctagataaaatactgaatcaaacggtgcagacgtattggcggatctaatggaatccaattgattaactatcttttgaaaatatacatttttatgatccaatacttgtaagaatatagaaataatgataagtccatcatcgtgtttttttgcctcttcataagaactatattttttcttattccaatgaacaagattaatctctccagagtatttgtacacatctatcaagtgattggatccataatcgtcttcctttccccaatatatatgtagtgatgataacacatattcattggggagaaaccctccacttatatatcctcctttaaaattaatccttactagttttccagtgttctggatagtggttggtttcgactcattataatgtatgtctaacggcttcaatcgcgcgttagaaattgcttttttagtttctatattaataggagatagttgttgcggcatagtaaaaatgaaatgataactgtttaaaaatagctcttagtatgggaattacaatggatgaggaagtgatatttgaaactcctagagaattaatatctattaaacgaataaaagatattccaagatcaaaagacacgcatgtgtttgctgcgtgtataacaagtgacggatatccgttaataggagctagaagaacttcattcgcgttccaggcgatattatctcaacaaaattcagattctatctttagagtatccactaaactattacggtttatgtactacaatgaactaagagaaatctttagacggttgagaaaaggttctatcaacaatatcgatcctcactttgaagagttaatattattgggtggtaaactagataaaaaggaatctattaaagattgtttaagaagagaattaaaagaggaaagtgatgaacgtataacagtaaaagaatttggaaatgtaattctaaaacttacaacacgggataaattatttaataaagtatatataagttattgcatggcgtgttttattaatcaatcgttggaggatttatcgcatactagtatttacaatgtagaaattagaaagattaaatcattaaatgattgtattaacgacgataaatacgaatatctgtcttatatttataatatgctagttaatagtaaatgaacttttacagatctagtataattagtcagattattaagtataatagacgactagctaagtctattatttgcgaggatgactctcaaattattacactcacggcattcgttaaccaatgcctatggtgtcataaacgagtatccgtgtccgctattttattaactactgataacaaaatattagtatgtaacagacgagatagttttctctattctgaaataattagaactagaaacatgtttagaaagaaacgattatttctgaattattccaattatttgaacaaacaggaaagaagtatactatcgtcatttttttctctagatccagctactactgataatgatagaatagacgctatttatccgggtggcatacccaaaaggggtgagaatgttccagagtgtttatccagggaaattaaagaagaagttaatatagacaattcttttgtattcatagacactcggttttttattcatggcatcatagaagataccattattaataaattttttgaggtaatcttctttgtcggaagaatatctctaacgagtgatcaaatcattgatacatttaaaagtaatcatgaaatcaaggatctaatatttttagatccgaattcaggtaatggactccaatacgaaattgcaaaatatgctctagatactgcaaaacttaaatgttacggccatagaggatgttattatgaatcattaaaaaaattaactgaggatgattgattaaaaaatataaattaatttaccatcgtgtatttttataacgggattgtccggcatatcatgtagatagttaccgtctacatcgtatactcgaccatctacgcctttaaatcctctatttattgacattaatctattagaattggaataccaaatattagtaccctcaattagtttattggtaatattttttttagacgatagatcgatggctcttgaaaccaaggttttccaaccggactcattgtcgatcggtgagaagtctttttcattagcatgaatccattctaatgatgtatgtttaaacactctaaacaattggacaaattcttttgatttgctttgaatgatttcaaataggtcttcgtctacagtaggcataccattagataatctagccattataaagtgcacgtttacatatctacgttctggaggagtaagaacgtgactattgagacgaatggctcttcctactatctgacgaagagacgcctcgttccatgtcatatctaaaatgaagatatcattaattgagaaaaaactaataccctcgcctccactagaagagaatacgcatgttttaatgcattctccgttagtgtttgattcttggttaaactcagccaccgccttgattctagtatcttttgttctagatgagaactctatattagagataccaaagactttgaaatatagtaataagatttctattcctgactgattaacaaatggttcaaagactagacatttaccatgggatgctaatattcccaaacatacatctataaatttgacgcttttctcttttaattcagtaaatagagagatatcagccgcactagcatcccctttcaatagttctccctttttaaaggtatctaatgcggatttagaaaactctctatctcttaatgaatttttaaaatcattatatagtgttgctatctcttgcgcgtattcgcccggatcacgattttgtctttcaggaaagctatcgaacgtaaacgtagtagccatacgtctcagaattctaaatgatgatatacctgtttttatttcagcgagtttagccttttgataaatttcttcttgctttttcgacatattaacgtatcgcattaatactgttttcttagcgaatgatgcagacccttctacgtcatcaaaaatagaaaactcgttattaactatatacgaacatagtcctcctagtttggagactaattctttttcatcgactagacgtttattctcaaatagcgattggtgttgtaaggatcctggtcgtagtaagttaaccaacatggtgaattcttgcacactattgacgataggtgtagccgataaacaaatcatcttatggttttttaacgcaatggtcttagataaaaaattatatactgaacgagtaggacggatcttaccatcttctttgattaatgatttagaaatgaagttatgacattcatcaataatgacgcatattctactcttggaattaatagttttgatattagtaaaaaatttatttctaaaattttgatcatcgtaattaataaaaatacaatccttcgttatctctggagcgtatctgagtatagtgttcatccaaggatcttctatcaaagcctttttcaccaataagataatagcccaattcgtataaatatccttaagatgtttgagaatatatacagtagtcattgttttaccgacacccgtttcatggaacaataaaagagaatgcatactgtctaatcctaagaaaactcttgctacaaaatgttgataatccttgaggcgtactacgtccgaccccatcatttcaacgggcatattagtagttctgcgtaaggcataatcgatataggccgcgtgtgatttactcatttatgagtgataagtaataactatgttttaaaaatcacagcagtagtttaactagtcttctctgatgtttgttttcgatactttttgaatcagaagtcatactagaataaagcaacgagtgaacgtaatagagagcttcgtatactctattcgaaaactctaagaacttattaatgaattccgtatccactggattgtttaaaatactaaattgaacactgttcacatccttccaagaagaagacttagtgacggacttaacatgagacataaataaatccaaattttttttacaaacatcactagccaccataatggcgctatctttcaaccagctatcgcttacgcattttagcagtctaacatttttaaagagactacaatatattctcatagtatcgattacacctctaccgaataaagttggaagtttaataatacaatatttttcgtttacaaaatcaaataatggtcgaaacacgtcgaaggttaacatcttataatcgctaatgtatagattgttttcagtgagatgattattagatttaatagcatctcgttcacgtttgaacagtttattgcgtgcgctgaggtcggcaactacggcgtccgctttagtactcctcccataatactttacgctattaatctttaaaatttcatagactttatctagatcgctttctggtaacatgatatcatgtgtaaaaagttttaacatgtcggtcggcattctatttagatcattaactctagaaatctgaagaaagtaattagctccgtattccagactaggtaatgggcttttacctagagacagattaagttctggcaatgtttcataaaatggaagaaggacatgcgttccctcccggatattttttacaatttcatccatttacaactctatagtttgttttcattattattagttattatctcccataatcttggtaatacttaccccttgatcgtaagataccttatacaggtcattacatacaactaccaattgtttttgtacataatagattggatggttgacatccatggtggaataaactactcgaacagatagtttatctttccccctagatacattagccgtaatagttgtcggcctaaagaatatctttggtgtaaagttaaaagttagggttcttgttccattattgctttttgtcagtagttcattataaattctcgagatgggtccgttctctgaatatagaacatcatttccaaatctaacttctagtctagaaataatatcggtcttattcttaaaatctattcccttgatgaagggatcgttaatgaacaaatccttggcctttgattcggctgatctattatctccgttatagacgttacgttgactagtccaaagacttacaggaatagatgtatcgatgatgttgatactatgtgatatgtgagcaaagattgttctcttagtggcatcactatatgttccagtaatggcggaaaactttttagaaatgttatatataaaagaattttttcgtgttccaaacattagcagattagtatgaagataaacactcatattatcaggaacattatcaatttttacatacacatcagcatcttgaatagaaacgataccatcttctggaacctctacgatctcggcagactccggataaccagtcggtgggccatcgctaacaataactagatcatccaacaatctactcacatatgcatctatataatctttttcatcttgtgagtaccctggatacgaaataaatttattatccgtatttccataataaggtttagtataaacagagagagatgttgccgcatgaacttcagttacagtcgccgttggttggtttatttgacctattactctcctaggtttctctataaacgatggtttaatttgtacattcttaaccatatatccaataaagctcaattcaggaacataaacaaattctttgttgaacgtttcaaagtcgaacgaagagtcacgaataacgatatcggatactggattgaaggttaccgttacggtaatttttgaatcggatagtttaagactgctgaatgtatcttccacatcaaacggagttttaatataaacgtatactgtagatggttctttaatagtgtcattaggagttaggccaatagaaatatcattaagttcactagaatatccagagtgtttcaaagcaattgtattattgatacaattattatataattcttcgccctcaatttcccaaataacaccgttacacgaagagatagatacgtgattaatacatttatatccaacatatggtacgtaactgaatcttcccatacctttaacttctggaagttccaaactcagaaccaaatgattaagcgcagtaatatactgatccctaatttcgaagctagcgatagcctgattgtctggaccatcgtttgtcataactccggatagagaaatatattgcggcatatacaaagttggaatttgactatcgactgcgaagacattagaccgtttaatagagtcatccccaccgatcaaagaattaatgatagtattattcattttctatttaaaatggaaaaagcttacaataaactccgtagagaaatatctataatttgtgagttttccttaaagtaacagcttccgtaaacgccgtctttatctcttagtaggtttattgtatttatgaccttttccttatcttcatagaatactaaaggcaacaaagaaatttttggttcttctctaagagctacgtgagacttaaccatagaagccaacgaatccctacatattttagaacagaaataccctacttcaccacccttgtatgtctcaatactaataggtctaaaaaccaaatcttgattacaaaaccaacacttatcaattacactatttgtcttaatagacacatctgccatagatttataatactttggtagtatacaagcgagtgcttcttctttagcgggcttaaagactgctttaggtgctgaaataaccacatctggaaggcttactcgcttagccatttaattacggaactatttttttatacttctaatgagcaagtagaaaacctctcatctacaaaaacgtactcgtgtccataatcctctaccatagttacacgttttttagatctcatatgtgctaaaaagttttcccatactaattggttactattatttttcgtataatttttaacagtttgaggttttagatttttagttacagaagtgatatcgaatattttatccaaaaagaatgaataattaattgtcttagaaggagtgttttcttggcaaaagaataccaagtgcttaaatatttctactacttcattaatcttttctgtactcagattcagtttctcatcttttacttgattgattatttcaaagactaacttataatcctttttatttattctctcgttagccttaagaaaactagatacaaaatttgcatctacatcatccgtggatatttgatttttttccatgatatccaagagttccgagataatttctccagaacattgatgagacaataatctccgcaatacatttctcaaatgaataagtttattagacacgtggaagtttgactttttttgtacctttgtacatttttgaaataccgactcgcaaaaaatacaatattcatatccttgttcagatactataccgttatgtctacaaccgctacataatcgtagattcatgttaacactctacgtatctcgtcgtccaatattttatataaaaacattttatttctagacgttgccagaaaatcctgtaatatttttagttttttgggctgtgaataaagtatcgccctaatattgttaccgtcttccgccaatatagtagttaaattatccgcacatgcagaagaacaccgcttaggcggattcagtacaatgttatatttttcgtaccaactcatttaaatatcataatctaaaatagttctgtaatatgtctagcgctaatatattgatcataatcctgtgcataaattaagatacaacaatgtctcgaaatcatcgacatggcttcttccatagttagaagatcgtcgtcaaagttagcaacgtgattcatcaacatttgctgttttgaggcagcaaatactgaaccgtcgccattcaaccattcataaaaaccatcgtctgaatccattgataatttcttgtactggtttttgagagctcgcatcaatctagcatttctagctcccggattgaaaacagaaagaggatcgtacatccagggtccattttctgtaaatagaatcgtataatgtcccttcaagaagatatcagacgatccacaatcaaagaattggtctccgagtttgtaacaaactgcggactttaacctatacatgataccgtttagcataatttctggtgatacgtcaatcggagtatcatctattagagatctaaagccggtgtaacattctccaccaaacatattcttattctgacgtcgttctacataaaacatcattgctccattaacgataacaggggaatgaacagcactacccatcacattagttcccaatggatcaatgtgtgtaactccagaacatcttccatagcctatgttaggaggagcgaacaccactcttccactattgccatcgaatgccatagaataaatatccttggaattgatagaaatcggactgtcggatgttgtgatcatcttcataggattaacaactatgtatggtgccgcctgaagtttcatatcgtaactgatgccgtttataggtctagccacagaaaccaacgtaggtctaaatccaactatagacaaaatagaagccaatatctgttcctcatctgtcataacttgagagcatccagtatgaataatcttcattagatggggatctaccgcatcatcatcgttacaataaaaaattcccattctaatgttcataattgcttttctaatcatggtatgcatgtttgctctctgaatctctgtggaaattagatctgatacacctgtaatcactatcggattatcctccgtaagacgattaaccaacaacatataattataagactttacttttctaaattcataaagttgctggattaggctataggtgtctccatgtacatacgcgttctcgagcgcaggaagtttaataccgaatagtgccatcagaataggatgaatatagtaattagtttctggttttctataaataaaagacaaatcttgtgaactagacatatcggtaaaatgcatggattggaatcgtgtagtcgacagaagaatatgatgattagatggagagtatattttatctaactctttgagttggtcaccgattctaggactagctcgagaatgaataagtactaaaggatgagtacatttcacagaaacactagcattgttcaatgtgctctttacatgggtaaggagttgaaatagctcgtttctatttgttctgacaatatttagtttattcataatgttaagcatatcctgaatagtaaagttagatgtgtcatacttgttagtagttagatatttagcaattgcattcccatcatttctcaatctcgtactccaatcatgcgtggatgctacttcgtcgatggaaaccatacaatcctttttgataggctgttgagattgatcatttcctgcacgtttaggtttggtacgttgatttctagcccctgcggatataaagtcatcgtctacaatttgggacaatgaattgcatacactacaagacaaagatttatcagaagtgtgaatatgatcttcatctaccaaagaaagagtttgattagtataactagattttagtcctgcgttagatgttaaaaaaacatcgctattgaccacggcttccattatttatattcgtagtttttactcgaaagcgtgattttaatatccaatcttattacttttggaatcgttcaaaacctttgactagttgtagaatttgatctattgccctacgcgtatactcccttgcatcatatacgttcgtcaccagatcgtttgtttcggcctgaagttggtgcatatctctttcaacattcgacatgagatccttaagggccatatcgtctagattttgttgagatgctgctcctggatttggattttgttgtgctgttgtacatactgtaccaccagtaggtgtaggagtacatacagtggccacaataggaggttgagaaagtgtaaccgttggagtagtacaagaaatacttccatccgattgttgtgtacatgtagttgttggtaacgtctgagaaggttgggtagatggcggcgtcgtcgttttttgatctttattaaatttagagataatatcctgaacagcattgctcggcgtcaacgctggaaggagtgaactcgccggcgcatcagtatcttcagacagccaatcaaaaagattagacatatcagatgatgtattagtttgttgtcgtggttttggtgtaggagcagtactactaggtagaagaataggagccgatgtagctgttggaaccggctgtggagttatatgaatagttggttgtagcggttggataggctgtctgctggcggccatcatattatctctagctagttgttctcgcaactgtctttgataatacgactcttgagactttagtcctatttcaatcgcttcatcctttttcgtatccggatccttttcttcagaataatagattgacgactttggtgtagaggattctgccagcctctgtgagaacttgttaaagaagtccatttaaggctttaaaattgaattgcgattataagattaaatggcagacacagacgatattatcgactatgaatccgatgatctcaccgaatacgaggatgatgaagaagaggaagaagatggagagtcactagaaactagtgatatagatcccaaatcttcttataagattgtagaatcagcatccactcatatagaagatgcgcattccaatcttaaacatatagggaatcatatatctgctcttaaacgacgctatactagacgtataagtctatttgaaatagcgggtataatagcagaaagctataacttgcttcaacgaggaagattacctctagtttcagaattttctgacgaaacgatgaagcaaaatatgctacatgtaattatacaagagatagaggagggttcttgtcctatagtcatcgaaaagaacggagaattgttgtcggtaaacgattttgacaaagatggtctaaaattccatctagactatattatcaaaatttggaaacttcaaaaacgatattagaatttatacgaatatcgttctctaaatgtcacaatcaagtctcgcatgttcagcaatttattgtcgtactttatatcgtgttcattaacgatatcttgcaaaatagtaatgattctatcttccttcgatagatattcttcagagattattgtcttatattctttcttgttatcagatatgaatttgataagactttgaacattattgatacccgtctgtttaattttttctacagatattttagttttggcagattctatcgtatctgtcaatagacatccaacatcgacattcgacgtcaattgtctataaatcaacgtataaattttagaaataacattagcgaattgttgtgcgttgatgtcgttattctgaaacagtatgattttaggtagcattttcttaacaaagagaacgtatttattgttactcagttgaacagatgatatatccagattactaacgcatctgattccgtataccaaactttcagaagaaatggtatacaattgtttgtattcattcaatgtctctttttcagaaattagtttagagtcgaatactgcaataattttcaagagatagttttcatcagataagattttatttagtgtagatatgataaaactattgttttgttggagaacttgatacgccgcgttctctgtagtcgacgctctcaaatgggaaacaatctccattatttttttggaatcggatactatatcttcggtatcttgacgcagtctagtatacatagagttaagagagattagagtttgtacattaagcaacatgtctctaaatgtggctacaaacttttcctttttcacatcatctagtttattatataccgatttcacaacggcaccagatttaaggaaccagaatgaaaaactctgataactacaatatttcatcatagttacgattttatcatcttctatagttggtgtaatagcgcatacctttttctccaagactggaaccaacgtcataaaaatgtttaaatcaaaatccatatcaacatctgatgcgctaagaccagtctcgcgttcaagattatctttactaatggtgacgaactcatcgtataaaactctaagtttgtccattatttatttacagatttagttgtttaatttatttgtgctcttccagagttgggatagtatttttctaacgtcggtattatattattaggatctacgttcatatgtatcataatattaatcatccacgttttgataaatctatctttagcttctgaaataacgtatttaaacaaaggagaaaaatatttagctacggcatcagacgcaataacattttttgtaaatgtaacgtatttagacgacagatcttcgttaaaaagttttccatctatgtagaatccatcggttgttaacaccattcccgcgtcagattgaataggagtttgaatagtttgttttggaaatagatccttcaataacttatagttgggtgggaaaaaatcgattttatcactagactctttcttttttactatcattacctcatgaactatttcttgaatgagtatatgtattttctttcctatatcggacgcgttcattggaaaatataccatgtcgttaactataagaatatttttatcctcgtttacaaactgaataatatcagatgtagttcgtaaacgaactatatcatcaccagcacaacatctaactatatgatatccactagtttcctttagccgtttattatcttgttccatattagcagtcattccatcatttaagaaggcgtcaaaaataatagggagaaatgacattttggattctgttacaactttaccaaaattaaggatatacggacttactatctttttctcaacgtcaatttgatgaacacacgatgaaaatgtgcttctatgagattgatcatgtagaaaacaacaagggatacaatatttccgcatatcatgaaatatattaagaaatcccaccttattatatttccccaaaggatccatgcacgtaaacattatgccgttatcattaataaagacttctttctcatcggatctgtaaaagttgttactgatttttttcattccaggatctagataattaataatgatgggttttctattcttattctttgtattttggcatatcctagaccagtaaacagtttccactttggtaaaatcagcagacttttgaacgctattaaacatggcattaatggcaataactaaaaatgtaaaatatttttctatgttaggaatatggtttttcactttaatagatatatggtttttggccaaaatgatagatatttttttatccgaggatagtaaaatattattagtcgccgtctctataaaaatgaagctagtctcgatatccaattttattctagaattgataggagtcgccaaatgtaccttatacgttatatctcccttgatgcgttccatttgtgtatctatatcggacacaagatctgtaaatagttttacgttattaatcatcacggtatcgccgtcgctagataacgctaatgtaccatccaagtcccaaatggagagatttaactgttcatcgtttagaataaaatgattaccggtcatattaataaagtgttcatcgtatctagataacaacgacttataattaatgtccaagtcttgaactcgctgaatgatcttttttaacccagttagttttagattggtacgaaatatattgttaaactttgattctacagtaatgtccaaatctagttgtggaaatacttccatcaacattgtttcaaacttgataatattattatctacatcttcgtacgatccaaattccggaatagatgtatcgcacgctctggccacccagataaccaaaaagtcacacgctccaggatatacattgtataaaaagctatcgttttttagtagggtttttttctgcgtgtatacgaagggattaaaaatagtattatcaacgtaactatattccaaattattcttatgagaatagataataatatcgtccttaatatctaacaaatttcctaaatatccctttaattgagtcattcgaagcgtcaatagaatatgtctcttaactatttccggctgttgtatatttaaatgacttcgtaaaaaataatatatgggcgacttctcatctatgtaatcatatggagtgagatatagggctcgttctacctcctgccccttacccacctgtaataccaattgcggacttactatatatcgcatatttatatcgtggggtaaagtgaaaatctactaccgatgatgtaagtcttacaatgttcgaaccagtaccagatcttaatttggaggcctccgtagaactaggggaggtaaatatagatcaaacaacacctatgataaaggagaatagcggttttatatcccgcagtagacgtctattcgcccatagatctaaggatgatgagagaaaactagcactacgattctttttacaaagactttattttttagatcatagagagattcattatttgttcagatgcgttgacgctgtaaaagacgtcactattaccaaaaaaaataacattatcgtggcgccttatatagcacttttaactatcgcatcaaaaggatgcaaacttacagaaacaatgattgaagcattctttccagaactatataatgaacatagtaagaaatttaaattcaactctcaagtatccatcatccaagaaaaactcggataccagtttggaaactatcacgtttatgattttgaaccgtattactctacagtagctctggctattcgagatgaacattcatctggcatttttaatatccgtcaagagagttatctggtaagttcattatctgaaataacatatagattttatctaattaatctaaaatctgatcttgttcaatggagtgctagtacgggcgctgtaattaatcaaatggtaaatactgtattgattacagtgtatgaaaagttacaactggtcatagaaaatgattcacaatttacatgttcattggctgtggaatcaaaacttccaataaaattacttaaagatagaaatgaattatttacaaaattcattaacgagttaaaaaagaccagttcattcaagataagcaaacgcgataaggatacgctactaaaatattttacttaggactggagttagaatttatagacgactcatttcgtttatcattgttactattattactattactatcattattagtgttggcattattagtattcttcttgtcatcttgttcagaaatatacagcaatgctatacctaatactaaatacattatcatgctcgcaatggctctaacaacaacgaaccaaaatgaatttggtcgtagcttttgttcacaaaaatacataaagaaatgtctacataaatctatggcgccattggctacttgaaatagcgccagtcctcctacagattttaatatagctgtataacatgacatttattcatcatcaaaagagacagagtcaccatctgtcatatttagattttttttcatgtgttcaaagtatcctctactcatttcattataatagtttatcatacttagaattttaggacggatcaatgagtaagacttgactagatcgtcagtagtaatttgtgcatcgtctattctgcatccgcttcgtcgaataatgtatagcatcgctttgagattctccatagctatcaagtctttatacaatgacatggaaatatctgtgaatactttatacttctccaacatcgatgccttaacatcatcgcctactttagcattgaaaatacgttctattgtgtagatggatgtagcaagatttttaaacaacaatgccatcttacacgatgattgcctcaagtctccaatcgtttgtttagaacgattagctacagagtccaatgcttggctgactagcatattattatctttagaaattgtattcttcaatgaggcgtttatcatatctgtgatttcgttagtcatattacagtctgactgggttgtaatgttatccaacatatcacctatggatacggtacacgtaccagcatttgtaataatcctatctaagatgttgtatggcattgcgcagaaaatatcttctcctgtaatatctccactctcgataaatctactcagattattcttaaatgccttattctctggagaaaagatatcagtgtccatcatttcattaatagtatacgcagaaaagataccacgagtatcaattctatccaagatacttatcggttccgagtcacagataatggtttcctctccttcgggagatcctgcatagaaatatctaggacaatagtttctatactgtctgtaactctgataatctctaaagtcactaactgataccatgaaattgagaagatcaaacgctgaagtaattaatttttctgcctcgtttttactacaactagttttcatcaatgtagtgacgatgtattgtttagttacttttggtctaatactgatgatagagatattattgcttcccataatggatcttctagtagtcaccttaaagcccattgatgcgaatagcagatagataaagtcttggtatgactcctttctaatatagtacggactacctttgtcacccaactttatacccacataagccataacaacctctttaatagccgtttcatgaggtttatcagccatgagcctgagtagttggaagaatctcatgaatcccgtctcagaaagtcctatatgcatgatagatttatctttcctgggaaactctcgtatagtcatagatgaaatactctttaaagtttctgaaataagattagtaacagtcttacctccgactactctaggtaacaaacaaactctaataggtgttttctctgcggagataatatcagaaaggatagagcaataagtagtattattgtgattataaagaccgaatacataacaggtagaatttataaacatcatgtcctgaaggtttttagacttgtattcctcgtaatccataccgtcccaaaacatggatttggtaactttgatagccgtagatctttgttccttcgccaacaggttaaagaaattaataaagaatttgttgtttctatttatgtccacaaattgcacgtttggaagcgccacggttacattcactgcagcattttgaggatcgcgagtatgaagtacgatgttattgtttactggtatatctggaaagaaatctaccagtctaggaataagagattgatatcgcatagaaatagtaaagtttataatctcatcatcgaagagcattttgttaccattgtaataaatatccactctgtcatatgtataaatgaagtactgttcaaacatgatgagatgtttatatgttggcatagtagtgagatcgacgtttggtaatggcaatgtattaagattaactccataatgtctagcagcatctgcgatgttataagcgtcgtcaaagcggggtcgatcttgtattgttatatattgtctaacacctataagattatcaaaatcttgtctgcttaatacaccgttaacaatttttgccttgaattcttttattggtgcattaataacatccttatagaggatgttaaacaaataagtgttatcaaagttaagatctggatatttcttttctgctagaacatccattgagtcggagccatctggtttaatataaccaccgataaatctagctctgtattctgtatccgtcaatctaatattaagaaggtgttgagtgaaaggtggaagatcgtaaaagctgtgagtattaatgataggattagtttccgaactaatgttaattggggtattaataatatctatatttccagcgttaagtgtaacattaaacagttttaattcacgtgacgtggtatcaattaaataattaatgcccaatttggatatagcagcctgaagctcatcttgtttagttacggatcctaatgagttattaagcaatatatcgaacggatgaacgaaggttgttttaagttggtcacatactttgtaatctagacatagatgcggaagaacggtagaaactatacgaaataaatattcagagtcctctaattgatcaagagtaactattgacttaataggcatcatttatttagtattaaatgacgaccgtaccagtgacggatatacaaaacgatttaattacagagttttcagaagataattatccatctaacaaaaattatgaaataactcttcgtcaaatgtctattctaactcacgttaacaacgtggtagatagagaacataatgccgccgtagtgtcatctccagaggaaatatcctcacaacttaatgaagatctatttccagatgatgattcaccggccactattatcgaacgagtacaacctcatactactattattgacgatactccacctcctacgtttcgtagagagttattaatatcggaacaacgtcaacaacgagaaaaaagatttaatattacagtatcgaaaaatgctgaagcaataatggaatctagatctatgataacttctatgccaacacaaacaccatccttgggagtagtttatgataaagataaaagaattcagatgttagaggatgaagtggttaatcttagaaatcaacgatctaatacaaaatcatctgataatttagataattttaccaaaatactatttggtaagactccgtacaaatcaacagaagttaataagcgtatagccatcgttaattatgcaaatttgaacgggtcccccttatcagtcgaggacttggatgtttgttcggaggatgaaatagatagaatctataaaacgattaaacaatatcacgaaagtagaaaacgaaaaattatcgtcactaacgtgattattattgtcataaacattatcgagcaggcattgctaaaactcggatttgaagaaatcaaaggactgagtaccgatatcacttcagaaattatcgatgtggagatcggagatgactgcgatgctgtagcatctaaactaggaatcggtaacagtccggttcttaatattgtattgtttatactcaagatattcgttaaacgaattaaaattatttaatttaatacattcccatatccagacaacaatcgtctggattaatctgttcctgtcgtctcataccggacgacatattaatctttttattagtgggcatctttttagatggtttctttttcccagcattaactgagtcgatacctagaagatcgtgattgatctctccgaccattccacgaacttctaattggccgtctctgacggtaccataaactattttaccagcattagtaacagcttggacaatctgaccatccatcgcattgtacgatgtagtagtaactgttgttctacgtctaggagcaccagaagtatttttggagcccttggatgttgatgtagaagaagacgaggattttgattttggtttacatgtaatacattttgaactctttgattttgtatcacatgcgccggcagtcacatctgtttgagaattaagattattgttgcctcctttgacggctgcatctccaccgatttgcgctagtagatttttaagctgtggtgtaatcttattaactgtttcgatataatcatcgtaactgcttctaacggctaaattttttttatccgccatttagaagctaaaaatatttttatttatgcagaagatttaactagattatacaatgaactaatatgatccttttccagattatttacaaacttggtattttttggttctggaggaggcgaatttaaattcggacttggattcggattttgtaagttcttgatcttattatacatcgagtataggatggcgacagtaactgctacacaaataccgatcaaaagaagaataccaatcatttattgacaataacttcactattgatcaagtatgcaatatatcatcttttcactaaataagtagtaataatgattcaacaatgtcgagatatatggacgataataatttagttcatggaaatatcgctatgattggtgtgaatgactccgctaactctgtggggtgcgcagtgctttccccacatagaataaattagcattccgactgtgataataataccaagtataaacgccataatactcaatactttccatgtacgagtgggactggtagacttactaaagtcaataaaggcgaagatacacgaaagaatcaaaagaatgattccagcgattagcacgccggaaaaataatttccaatcataagcatcatgtccatttaactaataaaaattttaaatcgccgaatgaacaaagtggaatataaaccatataaaaacaatagtttgtactgcaaaaataatatctatttttgttttcgaagatatggtaaaattaaatagtagtacacagcatgttataactaacagcagcaacggctcgtaattacttatcatttactagacgaaaaggtggtgggatattttcttgctcaaataatacgaatatatcacccatccattttatgcgatgtttatatactctaatctttaatagatctatagacgacgggtttaccaacaatatagattttatcgattcatctaatttaaacccttccttaaacgtgaatgatctattatctggcataacgatgaccctacctgatgaatcggacaatgtactgggccatgtagaataaattatcaacgaattatcgtctacgaacatttatatcatttgttttaattttaggacgcgaataaatggatataaaatagaaaataacagatattacaaccagtgttatggccgcgcccaaccaggtaggcagttttattttatcttttactacaggttctcctggatgtacgtcaccaacggcggacgtagttctagtacaattagacgtaagttccgcttgggaattttttaacgctaaagagttaacgttaatcgtgcacccaacgtatttacatctagttcgttgaacatcttgattataatataaccattttctatctctagattcgtcagtgcactcatgtaaccaacataccctaggtcctaaatatttatctccggaattagattttggataattcgcgcaccaacaatttctatttcctttatgatcgttacaaaagacgtataatgccgtatccccaaaagtaaaataatcaggacgaataattctaataaactcagaacaatatctcgcatccatatgtttggagcaaatatcggaataagtagacatagccggtttccgttttgcacgtaaccattctaaacaattggggtttccaggatcgtttctacaaaatccagtcatgaaatcgtcacaatgttctgtcttgtaattattattaaatatttttggacagtgtttggtatttgtcttagaacaacattttgccacgctatcactatcgcccaggagataatccttttttataaaatgacatcgttgcccggatgctatataatcagtagcgtgttttaaatccttaatatattcaggagttacctcgttctgataatagattaatgatccaggacgaaatttgaaagaactacatggttctccatgaattaatacatattgtttagcaaattcaggaactataaaactactacaatgatctatcgacataccatctatcaaacaaaacttgggtttaatttctcccggagatgtttcataatagtacgtataactttcttctgcaaacttaacagctctattatattcaggataattaaaacctaattccatatatttgtctcgtatatctgctattcctggtgctattttgattctattaagagtaacagctgcccccattcttaataatcgtcagtatttaaactgttaaatgttggtatatcaacatctaccttatttcccgcagtataaggtttgttgcaggtatactgttcaggaatggttacatttatacttcttctatagtcctgtctttcgatgttcatcacatatgcaaagaacagaataaacaaaataatgtaagaaataatattaaatatctgtgaattcgtaaatacattgattgccataataattacagcagctacaatacacacaatagacattcccacagtgttgccattacctccacgatacatttgagttactaagcaataggtaataactaagctagtaagaggcaatagaaaagatgagataaatatcatcaatatagagattagaggagggctatatagagccaagacgaacaaaatcaaaccgagtaacgttctaacatcattatttttgaagattcccaaataatcattcattcctccataatcgttttgcatcatacctccatctttaggcataaacgattgctgctgttcctctgtaaataaatctttatcaagcactccagcacccgcagagaagtcgtcaagcatattgtaatatcttaaataactcatttatatattaaaaaatgtcactattaaagatggagtataatctttatgccgaactaaaaaaaatgacttgtggtcaacccctaagtctttttaacgaagacggggatttcgtagaagttgaaccgggatcatcctttaagtttctgatacctaagggattttacgcctctccttccgtaaagacgagtctagtattcgagacattaacaacgaccgataataaaatcactagtatcaatccaacaaatgcgccaaagttatatcctcttcaacgcaaagtcgtatctgaagtagtttctaatatgaggaaaatgatcgaatcaaaacgtcctctatacatcactcttcacttggcgtgtggatttggtaagactattaccacgtgttatcttatggctacacacggtagaaaaaccgtcatttgcgtacccaataaaatgttaatacatcaatggaagacacaggtagaggcagtcggattggaacataagatatccatagatggagtaagtagtctattaaaggaactaaagactcaaagtccggatgtattaatagtagtcagtagacatctgacaaacgatgccttttgtaaatatatcaataagcattatgatttgttcatcttggatgaatcacatacgtataatctgatgaacaatacagcagttacaagatttttagcgtattatcctccgatgatgtgttattttttaactgctacacctagaccatctaaccgaatttattgtaacagtattattaatattgccaagttatccaatctaaaaaaaactatctatgcagtagatagtttttttgagccatattccacagataatattagacatatggtaaaacgactagatggaccatctaataaatatcatatatataccgagaagttattatctgtagacgagcctagaaatcaacttattcttgataccctggtagaagaattcaagtcaggaactattaatcgcattttagttattactaaactacgtgaacatatggtattattctacaaacgattattagattttttcggaccagaggttgtatttataggagacgcccaaaatagacgtactccagatatggtcaaatcaatcaaggaactaaatagatttatattcgtatccaccttattttattccggtactggtttagatattcctagtttggattcgttgttcatttgctcggcagtaatcaacaatatgcaaatagagcaattactagggagggtatgtcgagaaacagaactattagataggacggtatatgtatttcctaacacatccatcaaagaaataaagtacatgataggaaatttcatgcaacgaattattagtctgtctgtagataaactaggatttaaacaaaaaagttatcggaaacatcaagaatccgatcccacttctgcatgtacaacatcatccagagaagaacgtgtattaaatagaatatttaactcgcaaaatcgttaagaagtttaagcgacgatccgcatgctgcgcaggccagtgtattacccctcatagtattaatataatccaatgatacttttgtgatgtcggaaatcttaaccaatttagactgacaggcagaacacgtcatgcaatcatcatcgtcatcgataactgtagtcttgggcttctttttgcgactcttcattccggaacgcacattggtgctatccatttaggtagtaaaaaataagtcagaatatgccctataacacgatcgtgcaaaacctggtatatcgtctctatctttatcacaatatagtgtatcgacatttttattattattgacctcgtttatcttggaacatggaatgggaacatttttgttatcaacggccatctttgccttaattccagatgttgtaaaattataactaaacagtctatcatcgacacaaatgaaattcttgtttagacgtttgtagtttacgtatgcggctcgttcgcgtctcattttttcagatattgcaggtactataatattaaaaataagaatgaaataacataggattaaaaataaagttatcatgacttctagcgctgatttaactaacttaaaagaattacttagtctgtacaaaagtttgagattttcagattctgcggctatagaaaagtataattctttggtagaatggggaacatctacttactggaaaataggcgtgcaaaaggtagctaatgtcgagacgtcaatatctgattattatgatgaggtaaaaaataaaccgtttaatattgatccgggctattacattttcttaccggtatattttgggagcgtctttatttattcgaagggtaaaaatatggtagaacttggatctggaaactcttttcaaataccagatgatatgcgaagtgcgtgtaacaaagtattagacagcgataacggaatagactttctgagatttgttttgttaaacaatagatggataatggaagatgctatatcaaaatatcagtctccagttaatatatttaaactagctagtgagtacggattaaacatacccaaatatttagaaattgaaatagaggaagacacattatttgacgacgagttatactctattatagaacgctctttcgatgataaatttccaaaaatatccatatcgtatattaagttgggagaacttagacggcaagttgtagactttttcaaattctcattcatgtatattgagtccatcaaggtagatcgtataggagataatatttttattcctagcgttataacaaaatcaggaaaaaagatattagtaaaagatgtagaccatttaatacgatccaaggttagagaacatacatttgtaaaagtaaaaaagaaaaacacattttccattttatacgactatgatggaaacggaacagaaactagaggagaagtaataaaacgaattatagacactataggacgagactattatgttaacggaaagtatttctctaaggttggtagtgcaggcttaaagcaattgactaataaattagatattaatgagtgcgcaactgtcgatgagttagttgatgagattaataaatccggaactgtaaaacgaaaaataaaaaaccaatcagcatttgatttaagcagagaatgtttgggatatccagaagcggattttataacgttagttaataacatgcggttcaaaatagaaaattgtaaggttgtaaatttcaatattgaaaatactaattgtttaaataacccgagtattgaaactatatatggaaactttaaccagttcgtctcaatctttaatgtcgtcaccgatgtcaaaaaaagattattcgagtgaaataatatgcgcctttgatataggtgcaaaaaatcctgccagaactgttttagaagtcaaggataactccgttagggtattggatatatcaaaattagactggagttctgattgggaaaggcgcatagctaaagatttgtcacaatatgaatacactacagttcttctagaacgtcagcctagaaggtcgccgtatgttaaatttatctattttattaaaggctttttatatcatacatcggctgccaaagttatttgcgtctcgcctgtcatgtctggtaattcatatagagatcgaaaaaagagatcggtcgaagcatttcttgattggatggacacattcggattgcgagactccgttccggatagacgcaaattagacgatgtagcggatagtttcaatttggctatgagatacgtattagataaatggaatactaattatacaccttataataggtgtaaatctagaaattacataaaaaaaatgtaataacgttagtaacgccattatggataatctatttacctttctacatgaaatagaagatagatatgccagaactatttttaactttcatctaataagttgcgatgaaataggagatatatatggtcttatgaaagaacgcatttcctcagaggatatgtttgataatatagtgtataataaagatatacatcctgccattaagaaactagtgtattgcgacatccaacttactaaacacattattaatcagaatacgtatccggtatttaacgattcttcacaagtgaaatgttgtcattatttcgacataaactcagataatagcaatattagctctcgtacagtagagatatttgagagggaaaagtcatctcttgtatcatatattaaaactaccaataagaagagaaaggtcaattacggcgaaataaagaaaactgttcatggaggcactaatgcaaattacttttccggtaaaaagtctgacgagtatctgagtactacagttagatccaacattaatcaaccttggatcaaaaccatctctaagaggatgagagttgatatcattaatcactctatagtaacgcgtggaaaaagctctatattacaaactatagaaattatttttactaatagaacatgtgtgaaaatattcaaggattctactatgcacattattctatccaaggacaaggatgaaaaggggtgtatacacatgattgacaaattattctatgtctattataatttatttctgttgttcgaagatatcatccaaaacgagtactttaaagaagtagctaatgttgtaaaccacgtactcacggctacggcattagatgagaaattattcctaattaagaaaatggctgaacacgatgtttatggagttagcaatttcaaaatagggatgtttaacctgacatttattaagtcgttggatcataccgttttcccctctctgttagatgaggatagcaaaataaagttttttaaggggaaaaagctcaatattgtagcattacgatctctggaggattgtataaattacgtgactaaatccgagaatatgatagaaatgatgaaggaaagatcgactattttaaatagcatagatatagaaacggaatcggtagatcgtctaaaagaattgcttctaaaatgaaaaaaaacactaattcagaaatggatcaacgactagggtataagtttttggtgcctgatcctaaagccggagttttttatagaccgttacatttccaatatgtatcgtattctaattttatattgcatcgattgcatgaaatcttgaccgtcaagcggccactcttatcgtttaagaataatacagaacgaattatgatagaaattagcaatgttaaagtgactcctccagattactcacctataatcgcgagtattaaaggtaagagttatgacgcattagccacgttcactgtaaatatctttaaagaggtaatgaccaaagagggtatatccatcactaaaataagtagttatgagggaaaagattctcatttgataaaaattccgctactaataggatacgggaataaaaatccacttgatacagccaagtatcttgttcctaatgtcataggtggagtctttatcaataaacaatctgtcgaaaaagtaggaattaatctagtagaaaagattacaacatggccaaaatttagggttgttaagccaaactcattcactttctcgttttcctccgtatcccctcctaatgtattaccgacaagatatcgccattacaagatatctctggatatatcacaattggaagcgttgaatatatcatcgacaaagacatttataacggtcaatattgttttgctgtctcaatatttatctagagtgagtctagaattcattagacgtagtttatcatacgatatgcctccagaagttgtctatctagtaaacgcgataatagatagtgctaaacgaattactgaatctattactgactttaatattgatacatacattaatgacctggtggaagctgaacacattaaacaaaaatctcagttaacgatcaacgagttcaaatatgaaatgctgcataactttttacctcatatgaactatacacccgatcaactaaagggattttatatgatatctttactaagaaagtttctctactgtatcttccacacttctagatatccagatagagattcgatggtttgtcatcgcatcctaacgtacggcaaatattttgagacgttggcacatgatgaattagagaattacataggcaacatccgaaacgatatcatgaacaatcacaagaacagaggcacttacgcggtaaacattcatgtactaacaactcccggacttaatcacgcgttttctagcttattgagtggaaagttcaaaaagtcagacggtagttatcgaacacatcctcactattcatggatgcagaatatttctattcctaggagtgttggattttatccggatcaagtaaagatttcaaagatgttttctgtcagaaaataccatccaagtcaatatctttacttttgttcatcagacgttccggaaagaggtcctcaggtaggtttagtatctcaattgtctgtcttgagttccattacaaatatactaacgtctgagtatttggatttggaaaagaaaatttgtgagtatatcagatcatattataaagatgatataagttactttgaaacaggatttccaatcactatagaaaatgctctagtcgcatctcttaatccaaatatgatatgtgattttgtaactgactttagacgtagaaaacggatgggattcttcggtaacttggaggtaggtattactttagttagggatcacatgaatgaaattcgcattaatattggagcgggaagattagtcagaccattcttggttgtggataacggagagctcatgatggatgtgtgtccggagttagaaagcagattagacgacatgacattctctgacattcagaaagagtttccgcatgtcatcgaaatggtagatatagaacaatttacttttagtaacgtatgtgaatcggttcaaaaatttagaatgatgtcaaaggatgaaagaaagcaatacgatttatgtgactttcctgccgaatttagagatggatatgtagcatcttcattagtgggaatcaatcacaattctggacccagagctattcttggatgtgctcaagctaaacaagctatctcttgtctgagctcggatatacgaaataaaatagacaatggaattcatttgatgtatccagagaggccaatcgtgattagtaaggctttagaaacttcaaagattgcggctaattgcttcggccaacatgttactatagcattaatgtcgtacaaaggtatcaatcaagaggatggaattatcatcaaaaaacaatttattcagagaggcggtctcgatattgttacagccaagaaacatcaagtagaaattccattggaaaactttaataacaaagaaagagataggtctaacgcctattcaaaattagaaagtaatggattagttagactgaatgctttcttggaatccggagacgctatggcacgaaatatctcatcaagaactcttgaagatgattttgctagagataatcagattagcttcgatgtttccgagaaatataccgatatgtacaaatctcgcgttgaacgagtacaagtagaacttactgacaaagttaaggtacgagtattaaccatgaaagaaagaagacccattctaggagacaaatttaccactagaacgagtcaaaagggaacagtcgcgtatgtcgcggatgaaacggaacttccatacgacgaaaatggtatcacaccagatgtcattattaattctacatccatcttctctagaaaaactatatctatgttgatagaagttattttaacagccgcatattctgctaagccgtacaacaataagggagaaaaccgacctgtctgttttcctagtagtaacgaaacatccatcgatacatatatgcaattcgctaaacaatgttatgagcattcaaatccgaaattgtccgatgaagaattatcggataaaatcttttgtgaaaagattctctatgatcctgaaacggataagccttatgcatccaaagtattttttggaccaatttattacttgcgtctgaggcatttaactcaggacaaggcaaccgttagatgtagaggtaaaaagacgaagctcattagacaggcgaatgagggacgaaaacgtggaggaggtatcaagttcggagaaatggagagagactgtttaatagcgcatggtgcagccaatactattacagaagttttgaaagattcggaagaagattatcaagatgtgtatgtttgtgaaaattgtggagacatagcagcacaaatcaagggtattaatacatgtcttagatgttcaaaacttaatctctctcctctcttaacaaaaattgataccacgcacgtatctaaagtatttcttactcaaatgaacgccagaggcgtaaaagtcaaattagatttcgaacgaaggcctccttcgttttataaaccattagataaagttgatctcaagccgtcttttctggtgtaatattctagtttggtagtagatacatatcaatatcatcaaattcgagatccgaattataaaatgggcgtggattgttaactatagaatcggacgtctgatattcgaaaatctgtggagtttcaggttttggtggaggtgtaactgctacttgggatactgaagtctgatattcagaaagctgtggatgttctggttcggcatccaccgatggtgtcacatcactaatcggttcggtaacgtctgtggatggaggtgctacttctacagaacctgtagcctcagttgtcaacggagatacatttttaatgcgagaaaatgtataatttggtaatggtttcttatgtggatctgaagaagaggtaagatatctactagaaagataccgatcacgttctagttctcttttgtagaacttaactttttctttctccgcatctagttgatattccaacctcttcacgttactacgttcagattccaattcacgttcgcatgggttacctccgcagtttttacgagcgatttcacgttcagccttcatgcgtctctccctctctctatcgagtttatcagagcagtctttctgaaggcgatcgaactccataaatttctccaacgctttgattgtttccatagatttccgaagttcagcttttaggactgtgattctttttctttcgaattcacagctggatgtacaaccgtttccattaccgccatctctaagtttcttttctagatcggcaacatttcatccccatgccttttacattcctcgagtctactgtcgtcgaaatatcgttccagctccttttcgacatcaataactttagcacgttgtctctcaagctctcttttgtagttatctgattccctggcacgtttaagatcttcatgcaattgagtcagctcttaacttcctctcttgcttcttcgtcatagtacgcgcaatcactgtgagatccattgttaccacgtctacactcggcgagctcgcgtttaagagattcaatttcccgtttgtattggtccatgtttccattgctaccaccattagatttacaggctgctagttgtcgttcgagatcagaaatacgggttttcttggaattgatttcgtcgatgtacttggcatcgaaacacttattaagttctttttccaattctacgattttatttctttcgcgagtcaattccctcctgtagtaactatctgttttgtcagattcacgctctctacgtagactttcttgcaagttactaatttgttccctagcacgtccgagtttagttttatatgctgaatagagttctgattcatcctttgagcagatctctagcgatcgtttaagattcctaattctagtctttagcctatttacctcctcagaagatgttccgttaccgttgcgtttacactcgttaagctgtctatcaagatccatgattctatctctaagacgttgcatctctctttccatatcagcattgctttcattattacgtctgcagtcactcaactgtctttcaatatctgagattctatctctaagacgtcgcatctctctctgtttcggcattggtttcattattacgtttacagtcgttcaactgtctttcaagatctgatattctagattggagtctgctaatctctgtagcattttcacggcattcactcagttgtctttcaagatctgaaattttagattggagtctgctaatctctgtaagatttcctcctccgctctcgatgcagtcggtcaacttattctctagttctctaatacgcgaacgcagtgcatcaacttcttgcgtgtcttcctggttgcgtgtacattcatcgagatctctaacgcgtcgtcgttcttcctcaagttctctgcgtactacagaaagcgtgtccctatcttgttgatatttagcaatttctgattctagagtactgattttgcttacgtagttactaatagttgtcttggccttatcaagatcctccttgtatttgtcgcattccttgatatccctacgaagtctggacagttcccattcgacattacgacgtttatcgatttcagctcggagatcgtcatcgcgttgttttagccacatacgactgagttcaagttctcgttgacaagatccatctacttttccattcctaatagtatccagttccttttctagttctgaacgcatttctcgttccctatcaagcgattctctcaattctcggatagtcttcttatcaatttctaataaatctgaaccatcatctgtcccattttgaatatccctgtgttctttgatctcttttgtaagtcggtcgattctttcggttttataaacagaatccctttccaaagtcctaatcttactgagtttatcactaagttctgcattcaattcggtgagttttctcttggcttcttccaactctgttttaaactctccactatttccgcattcttcctcgcatttatctaaccattcaattagtttattaataactagttggtaatcagcgattcctatagccgttcttgtaattgtgggaacataattaggatcttctaatggattgtatggcttgatagcatcatctttatcattattagggggatggacaaccttaattggttggtcctcatctcctccagtagcgtgtggttcttcaataccagtgttagtaataggcttaggcaaatgcttgtcgtacgcgggcacttcctcatccatcaagtatttataatcgggttctacttcagaatattcttttctaagagacgcgacttcgggagttagtagaagaactctgtttctgtatctatcaacgctggaatcaatactcaagttaaggatagcgaatacctcatcgtcatcatccgtatcttctgaaacaccatcatatgacatttcatgaagtctaacgtattgataaatagaatcagatttagtattaaacagatccttaacctttttagtaaacgcatatgtatattttagatctccagatttcataatatgatcacatgccttaaatgtcagtgcttccatgatataatctggaacactaatgggtgacgaaaaagatacagcaccatatgctacgttgataaataaatctgaaccactaagtagataatgattaatgttaagaaagaggaaatattcagtgtataggtatgtcttggcgtcatatcttgtactaaacacgctaaacagtttgttaatgtgatcaatttccaatagattaattagagcagcgggaataccaacaaacatattaccacatccgtattttctatgaatatcacatatcatgttaaaaaatcttgatagaagagcgaatatctcgtctgacttaatgagtcgtagttcagcagcaacataagtcataactgtaaatagaacatactttcctgtagtgttgattctagactccacatcaacaccattattaaaaatagttttatatacatctttaatctgctctccgttaatcgtcgaacgttctagtatacggaaacactttgatttcttatctgtagttaatgacttagtgatatcacgaagaatattacgaattacatttcttgtttttcttgagagacctgattcagaactcaactcatcgttccatagtttttctacctcagtggcgaaatctttggagtgcttggtacatttttcaataaggttcgtgacctccatttattataaaaaatttattcaaaacttaactacaatcgggtaattataagatcgtagatctcccatgtggcggaatactaccatctatcgcatgtggatggacagtaggtaatggccatgggaacagtaatgtttgcatatttatctttcttgctagtattactgcatattgtcccaatgtttcgatgtgatgttctaacctatcaactgccgctgtatcacaacaatagtgtccgatgaaattaagattatgatccaatgtgtttaatatatgattatcaagtcttatacgatccgcgtcttttttgacaggatcaggttcttctacaggaagaagtttcggcctcttatgatattcatgtctgggaaacggtggtctagggtgaggctccggtatcggagtgggttttggattataatcatcatcgtctatgacatcatcttcgacttcgatatttattttgctatcttgatgatgtcctgtatcagttgcattttcagcactcgactgaatattagcgcattcattgtctattattaccatatttctaaacccaaaatgtatgtgttgaacatcagtactatcgttgatgagtcttatagcatgaattcgcttatcgttatcgggtttatcttctgtcaccttagcaattccttttttattaaactctacataatcatatccatttctattgtttgttctaatataaacgagtatagcatcattgctaaatttttcaatagtatcaaaaacagaatatcctaaaccatataatatatattcaggaacactcaaactaaatgtccaggattctcctaaatacgtaaactttaatagtgcgaaatcattcaaaaatctaccacttatagatagatagtacataaatgcgtatagtagtctacctatctctttattatgaaaaccggcattacgatcatatatgtcgtgatatacctgtgatccgtttacgttaaaccataaatacatgggtgatcctataaacatgaatttatttctaattctcagagctatagttaattgaccgtgtaatatttgcttacatgcatacttgatacgcttattaataagatttttatcattgctcgttatttcagaatcgtatatataaggagtaccatcgtgattcttaccagatattatacaaaatactatatataaaatatattgacccacgttagtaatcatataaatgtttaacgttttaaattttgtattcaatgatccattatcatacgctatcatggtcttgtaatattcattctttaaaatataatattgtgttagccattgcattggagctcctaatggagattttctattctcatccattttaggataggctttcataaagtccctaataacttcgtgaataatgtttctatgttttctactgatgcatgtatttgcttcgatttttttatcccatgtttcatctatcatagatttaaacgcagtaatgctcgcaacattaacatcttgaaccgttggtacaattccgttccataaatttataatgttcgccatttatataactcattttttgaatatacttttaattaacaaaagagttaagttactcatatggacgccgtccagtctgaacatcaatctttttagccagagatatcatagccgctcttagagtttcagcgtgattttccaacctaaatagaacttcatcgttgcgtttacaacacttttctatttgttcaaactttgttgttacattagtaatctttttttccaaattagttagccgttgtttgagagtttcctcattgtcgtcttcatcggctttaacaattgcttcgcgtttagcctctggctttttagcagcctttgtagaaaaaaattcagttgctggaattgcaagatcgtcatctccggggaaaagagttccgtccatttaaagtacagattttagaaactgacactctgcgttatttatatttggtacaacacatggattataaatattgatgttaataacatcagaaaatgtaaagtctatacattgttgcatcgtgttaaattttctaatggatctagtattattgggtccaacttctgcctgaaatccaaatatggaagcggatacaaaaccgtttcctggataaaccacacatctccacttttgctttacatcagaaattgtgtcgttgacatcttgaactctcctatctaatgccggtgttccacctatagattttgaatattcgaatgctgcatgagtagcattaaattccttaatattgccataattttcatatattgagtaaccctggataaaaagtaaacacaccgcagccgtcgctaccacaataaaaaaaattgatagagagttcatttataatctattagaagctgacaaaatttttttacacgcatcagacaatgctttaataaatagttcaacatctacttttgtcatatcgaaccgatggtatgattctaacctagaattacatccgaaaaagttgactatgttcatagtcattaagtcattaacaaacaacattccagactctggattataagacgatactgtttcgtcacaattacctaccttaatcatgtgattatgaatattggctattagagcaccttctaagaaatctataatatctttgaaacacgatttaaaatcaaaccacgaatatacttctacgaagaaagttagtttacccataggagaaataactataaatggagatctaaatacaaaatccggatctatgatagttttaacattattatattctctattaaatacctccacatctaaaaatgttaattttgaaactatgtcttcgtttattaccgtacctgaactaaacgctataagctctattgtttgagaactctttaaacgatattcttgaaatacatgtaacaaagtttcctttaactcggtcggtttatctaccatagttacagaatttgtatccttatctataatataataatcaaaatcgtataaagttatataattatcgcgttcagattgtgatcttttcaaatagactaaaaaccccatttctctagtaagtatcttatgtatatgtttgtaaaatatcttcatggtgggaatatgctctaccgcagttagccattcctcattgacagcggtagatgtattagacaaaactattccaatgtttaacaagggccattttacgagattattaaatccttgtttgataaatgtagccaatgagggttcgagttcaacgacgattgaattctcttcccgcggatgctgcatgatgaacgacgggatgttgttcgattgatttggaattctttttcgactttttgtttatattaaatattttaaaatttatagcggatagcaattcatgtaccacggataatgtagacgcgtattgcgcatcgatatctttattattagataaatttatcaataaatgtgagaagtttgcctcgttaaggtcttccatttaaatattatataaacatttgtgtttgtatcttattcgtcttttatggaatagttttttactagtaaagctgcaattacacactttgtccgtaaaacataaatataaacaccagcttttatcaatcgttccaaaaagtcgacggcggacatttttaacatggcatctattttaaatacacttaggtttttggaaaaaacatcattttataattgtaacgattcaataactaaagaaaagattaagattaaacataagggaatgtcatttgtattttataagccaaagcattctaccgttgttaaatacttgtctggaggaggtatatatcatgatgatttggttgtattggggaaggtaacaattaataatctaaagatgatgctattttacatggatttatcatatcatggagtgacaagtagtggagcaatttacaaattgggatcgtctatcgatagactttctctaaataggactattgttacaaaagttaataattatgatgatacattttttgacgacgatgattgatcgctattgcacaattttgtttttgtactttctaatatagtgtttaggttctttttcatatgagaatattgatttactaaaatatctatgtttaacttttgttctatgacgtccttatcggcggtatcggtacatatacgtaattcaccttcacaaaatacggagtcttcgataataatagccaatcgattattggatctagctgtctgtatcatattcaacatgtttaatatatcctttcgtttcccctttacaggcatcgatcgtagcatattttccgcgtctgatatggaaatgttaaaactacaaaaatgcgtaatgttagcccgtcctaatattggtacgtgtctataagtttggcatagtagaataatagacgtgtttaaatgccttccaaagtttaagaattctattagagtattgcattttgatagtttatcgcctacatcatcaaaaataagtaaaaagtgtgctgattttttatgattttgtgcgacagcaatacatttttctatgttacttttagttcgtatcagattatattctagagattcctgactactaacgaaattaatatgatttggccaaatgtatccatcataatctgggttataaacgggtgtaaacaagaatatatgtttatattttttaactagtgtagaaaacagagatagtaaatagatagtttttccagatccagatcctcctgttaaaaccattctaaacggcatttttaataaattttctcttgaaaattgtttttcttggaaacaattcataattatatttacagttactaaattaatttgataataaatcaaaatatggaaaactaaggttgttagtagggaggagaacaaagaaggcacatcgtgatataaataacatttattatcatgatgacaccagaaaacgacgaagagcagacatctgtgttctccgctactgtttacggagacaaaattcagggaaagaataaacgcaaacgcgtgattggtctatgtattagaatatctatggttatttcactactatctatgattaccatgtccgcgtttctcatagtgcgcctaaatcaatgcatgtctgctaacgaggctgctattactgacgccgctgttgccgttgctgctgcatcatctactcatagaaaggttgcgtctagcactacacaatatgatcacaaagaaagctgtaatggtttatattaccagggttcttgttatatattacattcagactaccagttattctcggatgctaaagcaaattgcactgcggaatcatcaacactacccaataaatccgatgtcttgactacctggctcattgattatgttgaggatacatggggatctgatggtaatccaattacaaaaactacatccgattatcaagattctgatgtatcacaagaagttagaaagtatttttgtgttaaaacaatgaactaatatttatttttgtacattaataaatgaaatcgcttaatagacaaactgtaagtaggtttaagaagttgtcggtgccggccgctataatgatgatactctcaaccattattagtggcataggaacatttctgcattacaaagaagaactgatgcctagtgcttgcgccaatggatggatacaatacgataaacattgttatttagatactaacattaaaatgtctacagataatgcggtttatcagtgtcgtaaattacgagctagattgcctagacctgatactagacatctgagagtattgtttagtattttttataaagattattgggtaagtttaaaaaagaccaatgataaatggttagatattaataatgataaagatatagatattagtaaattaacaaattttaaacaactaaacagtacgacggatgctgaagcgtgttatatatacaagtctggaaaactggttaaaacagtatgtaaaagtactcaatctgtactatgtgttaaaaaattctacaagtgacaacaaaaaatgaattaataataagtcgttaacgtacgccgccatggacgccgcgtttgttattactccaatgggtgtgttgactataacagatacattgtatgatgatctcgatatctcaatcatggactttataggaccatacattataggtaacataaaaactgtccaaatagatgtacgggatataaaatattccgacatgcaaaaatgctactttagctataagggtaaaatagttcctcaggattctaatgatttggctagattcaacatttatagcatttgtgccgcatacagatcaaaaaataccatcatcatagcatgcgactatgatatcatgttagatatagaagataaacatcagccattttatctattcccatctattgatgtttttaacgctacaatcatagaagcgtataacctgtatacagctggagattatcatctaatcatcaatccttcagataatctgaaaatgaaattgtcgtttaattcttcattctgcatatcagacggcaatggatggatcataattgatgggaaatgcaatagtaattttttatcataaaagttgtaaagtaaataataaaacaataaatattgaactagtagtacgtatattgagcaatcagaaatgatgctggtacctcttatcacggtgaccgtagttgcgggaacaatattagtatgttatatattatatatttgtaggaaaaagatacgtactgtctataatgacaataaaattatcatgacaaaattaaaaaagataaagagttctaattccagcaaatctagtaaatcaactgatagcgaatcagactgggaggatcactgtagtgctatggaacaaaacaatgacgtagataatatttctaggaatgagatattggacgatgatagcttcgctggtagtttaatatgggataacgaatccaatgttatggcgcctagcacagaacacatttacgatagtgttgctggaagcacgctgctaataaataatgatcgtaatgaacagactatttatcagaacactacagtagtaattaatgaaacggagactgttgaagtacttaatgaagataccaaacagaatcctaactattcatccaatcctttcgtaaattataataaaaccagtatttgtagcaagtcaaatccgtttattacagaacttaacaataaatttagtgagaataatccgtttagacgagcacatagcgatgattatcttaataagcaagaacaagatcatgaacacgatgatatagaatcatcggtcgtatcattggtgtgattagtttcctttttataaaattgaagtaatatttagtattattgctgccgtcacgttgtacaaatggagatattccctgtattcggcatttctaaaattagcaattttattgctaataatgactgtagatattatatagatacagaacatcaaaaaattatatctgatgagatcaatagacagatggatgaaacggtacttcttaccaacatcttaagcgtagaagttgtaaatgacaatgagatgtaccatcttattcctcatagattatcgacgattatactctgtattagttctgtcggaggatgtgttatctctatagataatgacatcaatggcaaaaatattctaacctttcccattgatcatgctgtaatcatatccccactgagtaaatgtgtcgtagttagcaagggtcctacaaccatattggttgttaaagcggatatacctagcaaacgattggtaacatcgtttacaaacgacatactatatgtaaacaatctgtcactgattaattatttgccgttgtctgtattcattattagacgagtcaccgactatttggatagacacatatgcgatcagatatttgctaataataagtggtattcccttataaccatcgacgataagcaatatcctattccatcaaactgtataggtatgtcctctgccaagtacataaattctagcatcgagcaagatactttaatccatgtttgtaacctcgagcatccgttcgactcagtatacaaaaaaatgcagtcgtacaattctctacctatcaaggaacaaatattgtacggtagaattgataatataaatatgagcattagtatttctgtggattaatagatttctagtatggggatcattaatcatctctaatctctaaatacctcataaaacgaaaaaaaagctattatcaaatactgtacggaatggattcattctcttctctttttatgaaactctgttgtatatctactgataaaactggaagcaaaaaatctgatagaaagaataagaataagatcaaggattatatggaacacgattattataaaataacaatagttcctggttcctcttccacgtctactagctcgtggtattatacacatgcctagtaatagtctctttgcgttgacggaaagcagactagaaataacaggctaaaatgttcagacaccataatagttcccaacccagataataacagagttccatcaacacattcctttaaactcaatcccaaacccaaaaccgttaaaatgtatccggccaattgatagtagataatgaggtgtacagcgcatgataatttacacagtaaccaaaatgaaaatactttagtaattataagaaatatagacggtaatgtcatcatcaacaatccgataatatgcctgagagtaaacattgacggataaaacaaaaatgctccgcataactctatcatggcaataacacaaccaaatacttgtaagattcctaaattagtagaaaatacaacgaatatcgatgtataagtgatctcgagaaataataagaataaagtaatgcccgtaaagataaacatcaacattgtttggtaatcattaaaccaattagtatgaagttgaactaatttcacagtagattttattccagtgttatcctcgcatgtataagtacctggtaagatatctttatattccataatcaatgagacatcactatctgataacgaatgaagtctagcactagtatgccatttacttaatattgtcgtcttggaagttttattataagttaaaatatcatggttatccaatttccatctaatatactttgtcggattatctatagtacacggaataatgatggtatcattacatgctgtatactctatggtctttgtagttgttataacaaccaacgtatagaggtatatcaacgatattctaactcttgacattttttatttatttaaaatgatacctttgttatttattttattctattttgctaacggtattgaatggcataagtttgaaacgagtgaagaaataatttctacttacttattagacgacgtattatacacgggtgttaatggggcggtatacacattttcaaataataaactaaacaaaactggtttaactaataataattatataacaacatctataaaagtagaggatgcggataaggatacattagtatgcggaaccaataacggaaatcccaaatgttggaaaatagacggttcagacgacccaaaacatagaggtagaggatacgctccttatcaaaatagcaaagtaacgataatcagtcacaacggatgtgtactatctgacataaacatatcaaaagaaggaattaaacgatggagaagatttgacggaccatgtggttatgatttattcacggcggataacgtaattccaaaagatggtttacgaggagcattcgtcgataaagacggtacttatgacaaagtttacattcttttcactgatactatcggctcaaagagaattgtcaaaattccgtatatagcacaaatgtgcctaaacgacgaaggtggtccatcatcattgtctagtcatagatggtcgacgtttctcaaagtcgaattagaatgtgatatcgacggaagaagttatagacaaattattcattctagaactataaaaacagataatgatacgatactatatgtattcttcgatagtccttattccaagtccgcattatgtacctattctatgaataccattaaacaatctttttctacgtcaaaattggaaggatatacaaagcaattgccgtctccagctcctggtatatgtttaccagctggaaaagttgttccacataccacgtttgaagtcatagaacaatataatgtactagatgatattataaagcctttatctaaccaacctatcttcgaaggaccgtctggtgttaaatggttcgatataaaggagaaggaaaatgaacatcgggaatatagaatatacttcataaaagaaaattctatatattcgttcgatacaaaatctaaacaaactcgtagctcgcaagtcgatgcgcgactattttcagtaatggtaactgcgaaaccgttatttatagcagatatagggataggagtaggaatgccacaaatgaaaaaaatacttaaaatgtaatcttaatcgagtacaccacacgacaatgaacaaacataagacagattatgctggttatgcttgctgcgtaatatgcggtctaattgtcggaattatttttacagcgacactattaaaagttgtagaacgtaaattagttcatacaccattaatagataaaacgataaaagatgcatatattagagaagattgtcctactgactggataagctataataataaatgtatccatttatctactgatcgaaaaacctgggaggaaggacgtaatgcatgcaaagctctaaattcaaattcggatctaattaagatagagactccaaacgagttaagttttttaagaagccttagacgaggctattgggtaggagaatccgaaatattaaaccagacaaccccatataattttatagctaagaatgccacgaagaatggaactaaaaaacggaaatatatttgtagcacaacgaatactcccaaactgcattcgtgttacactatataacaattacactacatttttatcataccactacttcggttagatgttttagaaaaaaataaatatcgccgtaccgttcttgtttttataaaaataacaattaacaattatcaaattttttctttaatattttacgtggttgaccattcttggtggtaaaataatctcttagtgttggaatggaatgctgtttaatgtttccacactcatcgtatattttgacgtatgtagtcacatcgtttacgcaatagtcagactgtagttctatcatgcttcctacatcagaaggaggaacagttttaaagtctcttggttttaatctattaccgttagttttcatgaaatcctttgttttatccacttcacattttaaataaatgtccactatacattcttttgttaattttactagatcgtcatgggtcatagaatttataggttccgtagtccatggatccaaactagcaaacttcgcgtatacggtatcgcgattagtgtatacaccaactgtatgaaaattaagaaaacagtttaataaatcaacagaaatatttaatcctccgtttgatacagatgcgccatatttatggatttcggattcacacgttgtttgtctgaggtgttcgtctagtgttgcttctacgtaaacttcgattcccatatattctttattgtcagaatcgcataccgatttatcatcatacactgtttgaaaactaaatggtatacacatcaaaataataaataataacgagtacattctgcaatattgttatcgtaattggaaaaatagtgttcgagtgagttggattatgtgagtattggattgtatattttattttatattttgtaataagaataaaatgctaatgtcaagtttattccaatagatgtcttattaaaaacatatataataaataacaatggctgaatggcataaaattatcgaggatatctcaaaaaataataagttcgaggatgccgccatcgttgattacaagactacaaagaatgttctagctgctattcctaacagaacatttgccaagattaatccgggtgaaattattcctctcatcactaatcgtaatattctaaaacctcttattggtcagaaatattgtattgtatatactaactctctaatggatgagaacacgtatgctatggagttgcttactgggtacgcccctgtatctccgatcgttatagcgagaactcataccgcacttatatttttgatgggtaagccaacaacatccagacgtgacgtgtatagaacgtgtagagatcacgctacccgtgtacgtgcaactggtaattaaaataaaaagtaatattcatatgtagtgtcaattttaaatgatgatgatgaaatggataatatccatattgacgatgtcaataatgccggtattggcatacagttcatcgatttttagatttcattcagaggatgtggaattatgttatgggcatttgtattttgataggatctataatgtagtaaatataaaatataatccgcatattccatatagatataattttattaatcgcacgttaaccgtagatgaactagacgataatgtcttttttacacatggttattttttaaaacacaaatatggttcacttaatcctagtttgattgtctcattatcaggaaacttaaaatataatgatatacaatgctcagtaaatgtatcgtgtctcattaaaaatttggcaacgagtacatctactatattaacatctaaacataagacttattctctacatcggtccacgtgtattactataataggatacgattctattatatggtataaagatataaatgacaagtataatgacatctatgattttactgcaatatgtatgctaatagcgtctacattgatagtgaccatatacgtgtttaaaaaaataaaaatgaactcttaattatgctatgctattagaaatggataaaatcaaaattacggttgattcaaaaattggtaatgttgttaccatatcgtataacttggaaaagataactattgatgtcacacctaaaaagaaaaaagaaaaggatgtattattagcgcaatcagttgctgtcgaagaggcaaaagatgtcaaggtagaagaaaaaaatattatcgatattgaagatgacgatgatatggatgtagaaagcgcgtaatacgatctataaaaataagtatataaatactttttatttactgtactcttactgtgtagtggtgataccctactcgattatttttttaaaaaaaaaatacttattctgattcttctagccatttccgtgttcgtttgaatgccacatcgacgtcaaagataggggagtagttgaaatctagttctgcattgttggtacgcacctcaaatgtagtgttggatatcttcaacgtatagttgttgagtagtgatggttttctaaatagaattctcttcatatcattcttgcacgcgtacatttttagcatccatcttggaatcctagatccttgttctattcccaatggtttcatcaatagaagattaaacatatcgtacgaacacgatggagagtaatcgtagcaaaagtaagcatttcctttaatcttagatcccggatactggatatattttgcagccaacacgtgcatccatgcagcatttcctacatatacccggctatgcaccgcgtcatcatcgactgtacgatacataatgttaccgtgttgcttacattgctcgtaaaagactttcatcaatttgtctccttctccgtaaattccagtgggtcttaggcaacaagtatacaattttgctccattcatgattacggaattattggctttcataaccagttgctcggccatacgtttactttttgcgtatacatgtcctggtgatatatcataaagggtatgctcatggccgatgaatggatcaccgtgtttattgggtcctattgcttccatgctactagtatagatcaaatacttgattcctaggtccacacaagctgccaaaatagtctgtgttccataatagtttactttcatgatttcattatcggtgtattttccaaatacatccactagagcagccgtatgaataatcagatttaccccatctagcgcttctctcaccttatcaaagtcgtttatatcacattgtatatagtttataaccttaactttcgaggttattggttgtggatcttctacaatatctatgactctgatttcttgaacatcatctgcactaattaacagttttactatatacctgcctagaaatccggcaccaccagtaaccgcgtacacggccattgctgccactcataatatcagactacttattctattttactaaataatggctgtttgtataatagaccacgataatatcagaggagttatttactttgaaccagtccatggaaaagataaagttttaggatcagttattggattaaaatccggaacgtatagtttgataattcatcgttacggagatattagtcaaggatgtgattccataggcagtccagaaatatttatcggtaacatctttgtaaacagatatggtgtagcatatgtttatttagatacagatgtaaatatatttacaattattggaaaggcgttatctatttcaaaaaatgatcagagattagcgtgtggagttattggtatttcttacataaatgaaaagataatacattttcttacaattaacgagaatggcgtttgatatatcagttaatgcgtctaaaacaataaatgcattagtttacttttctactcagcaaaataaattagtcatacgtaatgaagttaatgatacacactacactgtcgaatttgatagggacaaagtagttgacacgtttatttcatataatagacataatgacaccatagagataagaggggtgcttccagaggaaactaatattggttgcgcggttagtatgacttacttgtataataagtatagttttaaactgattttagcagaatatataagacacagaaatactatatccggcaatatttattcggcattgatgacactagatgatttggctattaaacagtatggagacattgatctattatttaatgagaaacttaaagtagactccgattcgggactatttgactttgtcaactttgtaaaggatatgatatgttgtgattctagaatagtagtagctctatctagtctagtatctaaacattgggaattgacaaataaaaaatataggtgtatggcattagccgaacatatatctgatagtattccaatatctgagctatctagactacgatacaatctatgtaagtatctacgcggacacactgagagcatagaggataaatttgattattttgaagacgatgattcgtctacatgttctgccgtaaccgacagggaaacggatgtataattttttttatagcgtgaaggatatgataaaaaatataattgttgtatttatcccattccaatcaccttatatgattctgtaacacaataaaggagtcttatagatgtatagaggtcagatactggtttgataaactgtttattccacataagtatgtttgactttatggttagacccgcatactttaacaaatcactgaaaattggagttaggtattgacctctcagaatcagttgccgttctggaacattaaatgtattttttatgatatactccaacgcatttatgtgggcatacaacaagtcattactaatggaatattccaagagttttagttgtctagtatttaacaagagaagagatttcaacagactgtttatgaactcgaatgccgcctcattgtcgcttatattgatgatgtcgaattctcccaatatcatcaccgatgagtagctcatcttgttatcgggatccaagttttctaaagatgtcattaaaccctcgatcatgaatggatttatcatcatcgtttttatgttggacatgagcttagtccgtttgtccacatctatagaagatgatttctgaattatttcatatatctctctctttaactccaggaacttgtcaggatggtctactttaatatgttctcgtctaagagatgaaaatctttggatggttgcacgcgacttttctctaaaggatgacgttgcccaagatcctctcttaaatgaatccatcttatccttggacaagatggacagtctattttccttagatggtttaatatttttgttacccatgatctataaaggtagacctaatcgtctcggatgaccatatatttattttcagttttattatacgcataaattgtaaaaaatatgttaggtttacgaaaatgtctcgtggggcattaatcgtttttgaaggattggacaaatctggaaaaacaacacaatgtatgaacatcatggaatcaataccttcaaacacaataaaataccttaactttcctcagagatccactgtcactggaaagatgatagatgactatctaactcgtaaaaaaacctataatgatcatatagttaatctattattttgtgcaaatagatgggagtttgcatcttttatacaagaacaactagaacagggaattactttaatagttgatagatacgcattttctggagtagcgtatgccgccgctaaaggcgcgtcaatgactctcagtaagagttatgaatctggattgcctaaacccgacttagttatattcttggaatctggtagcaaagaaattaatagaaacgtcggtgaggaaatttatgaagatgttacattccaacaaaaggtattacaagaatataaaaaaatgattgaagaaggagatattcattggcaaattatttcttctgaattcgaggaagatgtaaagaaggagttgattaagaatatagttatagaggctatacacacggttactggaccagtggggcaactgtggatgtaatagtgaaattacattttttataaatagatgttagtacagtgttataaatggatgaagcatattactctggcaacttggaatcagtactcggatacgtgtccgatatgcataccgaactcgcatcaatatctcaattagttattgccaagatagaaactatagataatgatatattaaacaaggacattgtaaattttatcatgtgtagatcaaacttggataatccatttatctctttcctagatactgtatatactattatagatcaagagaactatcagactgagttgattaattcattagacgacaatgaaattatcgattgtatagttaataagtttatgagcttttataaggataacctagaaaatatagtagatgctatcattactctaaaatatataatgaataatccagattttaaaactacgtatgccgaagtactcggttccagaatagccgatatagatattaaacaagtgatacgtaagaatatactacaattgtctaataatatccgcgaacgatatttgtgaaaatattaaaaaaaaatactttttttattaaatgacgtcttttcgtgaatttagaaaattatgctgtgctatatatcacgcatcaggatataaagaaaaatctaaattaattagagactttataacagatagggatgataaatatttgatcattaagctattgcttcccggattagacgatagaatttataacatgaacgataaacaaattataaaattatatagtataatatttaaacaatctcaggaagatatgctacaagatttaggatacggatatataggagacactattaggactttcttcaaagagaacacagaaatccgtccacgagataaaagcattttaactttagaagaagtggatagttttttaactacgttatcatccgtaactaaagaatcgcatcaaataaaattattgactgatgtagcatctgtttgtacatgtaatgatttaaaatgtgtagtcatgcttattgataaagatctaaaaattaaagcgggtcctcggtacgtacttaacgctattagtcctaatgcctatgatgtgtttagaaaatctaataacttgaaagagataatagaaaattcatctaaacaaaatctagactctatatctatttctgttatgactccaattaatcccatgttagcggaatcgtgtgattctgtcaataaggcgtttaaaaaatttccatcaggaatgtttgcggaagtcaaatacgatggtgaaagagtacaagttcataaaaataataacgagtttgccttctttagtagaaacatgaaaccagtactctctcataaagtggattatctcaaagaatacataccgaaagcatttaaaaaagctacgtctatcgtattggattctgaaattgttcttgtagacgaacataatgtaccgctcccgtttggaagtttaggtatacacaaaaagaaagaatataaaaactctaacatgtgtttgttcgtgtttgactgtttgtactttgatggattcgatatgacggacattccattgtacgaacgaagatcttttctcaaagatgttatggttgaaatacccaatagaatagtattctcagagttgacgaatattagtaacgagtctcagttaactgacgtattggatgatgcactaacgagaaaattagaaggattggtcttaaaagatattaatggagtatacgaaccgggaaagagaagatggttaaaaataaagcgagactatttgaacgagggttccatggcagattctgccgatttagtagtactaggtgcctactatggtaaaggagcaaagggtggtatcatggcagtctttctaatgggttgttacgacgatgaatccggtaaatggaagacggttaccaagtgttcaggacacgatgataatacgttaagggagttgcaagaccaattaaagatgattaaaattaacaaggatcccaaaaaaattccagagtggttagtagttaataaaatctatattcccgattttgtagtagaggatccgaaacaatctcagatatgggaaatttcaggagcagagtttacatcttccaagtcccataccgcaaatggaatatccattagatttcctagatttactaggataagagaggataaaacgtggaaagaatctactcatctaaacgatttagtaaacttgactaaatcttaatagttacatacaaactgaaaattaaaataacactatttagttggtggtcgccatggatggtgttattgtatactgtctaaacgcgctagtaaaacatggcgaggaaataaatcatataaaaaatgatttcatgattaaaccatgttgtgaaagagtttgtgaaaaagtcaagaacgttcacattggcggacaatctaaaaacaatacagtgattgcagatttgccatatatggataatgcggtatccgatgtatgcaattcactgtataaaaagaatgtatcaagaatatccagatttgctaatttgataaagatagatgacgatgacaagactcctactggtgtatataattattttaaacctaaagatgccattcctgttatcatatctataggaaaggataaagatgtctgtgaactattaatctcatcagacatatcgtgtgcatgcgtggagttaaattcatatcacgtagccattcttcccatggatgtttccttttttaccaaaggaaatgcatcattgattattctcctgtttgatttctctatcgatgcggcacctctcttaagaagtgtaaccgataataatgttattatatctagacaccagcgtctacatgacgagcttccgagttccaattggttcaagttttacataagtataaagtccgactattgttctatattatatatggttgttgatggatctgtgatgcatgcgatagctgataatagaactcacgcaattattagcaaaaatatattagacaatactacgattaacgatgagtgtagatgctgttattttgaaccacagattaggattcttgatagagatgagatgctcaatggatcatcgtgtgatatgaacagacattgtattatgatgaatttacctgatgtaggcgaatttggatctagtatgttggggaaatatgaacctgacatgattaagattgctctttcggtggctggtaatttaataagaaatcgagactacattcccgggagacgaggatatagctactacgtttacggtatagcctctagataatttttttaagcacgaaataaaaaacataattttaaaccaatctatttcatactattttgtgtgatcaccatggacataaagatagatattagtatttctggtgataaatttacggtgactactaggagggaaaatgaagaaagaaaaaaatatctacctctccaaaaagaaaaaactactgatgttatcaaacctgattatcttgagtacgatgacttgttagatagagatgagatgtttactattctagaggaatattttatgtacagaggtctattaggcctcagaataaaatatggacgactctttaacgaaattaaaaaattcgacaatgatgcggaagaacaattcggtactatagaagaactcaagcagaaacttagattaaattctgaagagggagcagataactttatagattatataaaggtacaaaaacaggatatcgtcaaacttactgtatacgattgcatatctatgataggattgtgtgcatgcgtggtagatgtttggagaaatgagaaactgttttctagatggaaatattgtttacgagcgattaaactgtttattgatgatcacatgcttgataagataaaatctatactgcagaatagactagtatatgtggaaatgtcatagaaagttaaaagttaatgagagcaaaaatatataaggttgtattccatatttgttatttttttctgtaatagttagaaaaatacattcgatggtctatctatcagattattatgtgttataaggtactttttctcataataaactagagtatgagtaagatagtgtttttcaaaacatataaatctaaaattgatggatgagatatacagctattaatttcgaaaatatattttaatctgataactttaaacatggatttttaatggtggtttaacgttttaaaaaaagattttgttattgtagtatatgataatattaaaagatggatataaagaatttgctgactgcatgtactattttttacattactacattggctacggcagatatacctacttcgtcactgccacacgctccggtaaacggggcatgtgacgagggagaatatcttgataagaggcataatcaatgttgtaatcagtgtccacctggagaatttgccaaggttagatgtaatggtaacgataacacaaaatgtgaacgctgcccacctcatacatataccgcaatccccaattactctaatggatgtcatcaatgtagaaaatgcccaacaggatcatttgataaggtaaagtgtaccggaacacagaacagtaaatgttcgtgtcttcctggttggtattgcgctactgattcttcacagactgaagattgtcgagattgtataccaaaaaggagatgtccatgcggatactttggtggaatagatgaacaaggaaatcctatttgtaaatcgtgttgtgttggtgaatattgcgactacctacgtaattatagacttgatccatttcctccatgcaaactatctaaatgtaattaattatgattttgatgataatgttaccatacattatatcgctacttggttagtgtattattcagtatgaagacctattaataattacttatcttttgacgatcttgttataattataatataaaaatacttatggcatagtaactcataattgctgacgcgataaattcgtaataatctgttttgttcaaatttttataaggaatctacaggcataaaaataaaaatataatttataatatactcttacagcgcgccatcatgaataacagcagtgaattgattgctgttattaatggatttagaaatagtggacgattttgtgatattaatatagttattaatgatgaaaggataaacgctcacagactcatcctatctggagcctccgaatatttttccattctgttttccaataattttatcgattctaatgaatacgaagttaatctaagtcatttagattatcaaagtgttaacgatttgatcgattacatttatgggatacctttgagcctaactaacgataacgtgaaatatattctttcaaccgctgattttttacaaattggatctgctattacggagtgtgaaaattacatacttaaaaatctttgttctagaaactgtatcgatttctacatatacgctgataaatataataacaagaaaatagaatcagcgtcgtttaacacaatattacaaaatattttgagactcatcaacgatgaaaactttaaatacttaacagaggaatcaatgataaaaattttaagcgatgatatgttaaatataaaaaatgaggatttcgccccactaattctcattaaatggttagagagtactcaacaaccatgcaccgtcgagttacttaaatgcctcagaatatcattgctttccccacaagttataaaatcactttatagtcatcgactggttagttcaatctacgaatgtataacattcttaaacaatatagcattcttggatgaatcatttcctagataccatagcatcgagttgatatctatcggtataagtaattcgcatgataagatttccataaactgctacaatcataaaaaaaatacatgggaaatgatatcttcacgtagatataggtgtagtttcgcagtggccgtcctggataatattatctatatgatgggtggatatgatcagtccccgtatagaagttcaaaggttatagcgtacaatacatgtacaaattcttggatatatgatataccagagctaaaatatcctcgttctaattgtgggggactggctgatgacgaatacatttattgtataggcggcatacgcgatcaggattcatcgttgacatctagtattgatagatggaagccatcaaaaccatattggcagaagtatgctaaaatgcgcgaaccaaaatgtgatatgggggttgcgatgttaaacggattaatatatgttataggtggaatcgttaaaggtgacacgtgtaccgacgcactagagagtttatcagaagatggatggatgaagcatcaacgtcttccaataaaaatgtccaatatgtcgacgattgttcatgatggcaagatttatatatctggaggttacaacaatagtagtgtagttaatgtaatatcgaatctagtccttagctataattcgatatatgatgaatggaccaaattatcatcattaaacattcctagaattaatcccgctctatggtcagcgcataataaattatatgtaggaggaggaatatctgatgatgttcgaactaatacatctgagacatacgacaaagaaaaagattgttggacattggataatggtcacgtgttaccacgcaattatataatgtataaatgcgaaccgattaaacataaatatccattggaaaaaacacagtacacgaatgattttctaaagtatttggaaagttttataggtagttgatagaacaaaatacataattttgtaaaaataaatcactttttatactaatatgacacgattaccaatacttttgttactaatatcattagtatacgctacaccttttcctcagacatctaaaaaaataggtgatgatgcaactctatcatgtaatcgaaataatacaaatgactacgttgttatgagtgcttggtataaggagcccaattccattattcttttagctgctaaaagcgacgtcttgtattttgataattataccaaggataaaatatcttacgactctccatacgatgatctagttacaactatcacaattaaatcattgactgctagagatgccggtacttatgtatgtgcattctttatgacatcgcctacaaatgacactgataaagtagattatgaagaatactccacagagttgattgtaaatacagatagtgaatcgactatagacataatactatctggatctacacattcaccggaaactagttctgagaaacctgattatatagataattctaattgctcgtcggtattcgaaatctaagctcttttttttttttttttttttggcatataaataagtcgacccaccatggagacagacacactcctgctatgggtactgctgctctgggttccaggttccactggtgacgaggtccaactggtggagtcagggggagggctggtccagcctggagggtccctgaggctctcctgtgcagcctctggattcactatcagcgactactggatccactgggttcgccaggccccgggcaagggcctggagtgggtcgcaggaatcaccccagccggtggttacacctactacgccgactcagtcaagggacgattcaccatctccgccgacacctccaagaacaccgcctacctgcaaatgaacagcctgagggccgaggacacggccgtgtattactgtgcaaggttcgtgttcttcctgccatatgccatggactactggggccaagggaccctggtcaccgtctcctcaggtggtggcggttcaggcggaggtggctctggcggtggcggatcggacattcagatgacccagtctccaagctccctgtccgctagcgtcggagacagggtcactatcacttgcagagcttcccaggacgtctccactgcagtggcatggtaccagcagaagccagggaaggcaccaaagctccttatttactcagcaagcttcctttactccggagtcccatcccgattcagcggcagcggcagtggcacagattttaccctcacaatttcaagcctccaaccagaggatttcgcaacctactactgtcaacaaggctacggcaacccattcaccttcgggcaagggaccaaggttgagattaagcgataattaattaatttttatcgatctaattcaacaatgtctggagagcttcgcaggatcccgactccggaaccaattactgataaagaagaagatcatacagttacagacactgtctcatacactacagtaagtacatcatctggaattgtcactactaaatcaaccaccgatgatacgtacaatgataatgatacagtaccaccaactactgtaggcggtagtacaacctctattagcaattataaaaccaaggactttgtagaaatatttggtattaccgcattaattatattgtcggccgtggcaatattctgtattacgtattatatatgtaataaacgttcacgtaaatacaaaacagagaacaaagtctagatttttgacttacataaatgtctgggatagtaaaatctatcatattgagcggaccatctggtttaggaaagacagccatagccaaaagactatgggaatatatttggatttgtggtgtcccataccactagatttcctcgtcctatggaacgagaaggtgttgattaccattacgttaacagagaggccatctggaagggaatagccgccggaaactttctagaacatactgagtttttaggaaatatttacggaacttctaaaacagctgtgaatacagcggctattaataatcgtatttgtgtgatggatctaaacatcgacggtgttagaagtcttaaaaatacgtacctaatgccttactcggtgtatataagacctacctctcttaaaatggttgagaccaagcttcgtcgtagaaacactgaagctaacgatgagattcatcgtcgtgtgatgttggcaaaaactgacatggatgaggcaggtgaagccggtctattcgacactattatcattgaagatgatgtgaatttagcatatagtaagttaattcagatactacaggaccgtattagaatgtattttaacactaattagagacttaagacttaaaacttgataattaataatataactcgtttttatatgtgtctatttcaacgtctaatgtattagttaaatattaaaacttaccacgtaaaacttaaaatttaaaatgatatttcattgacagatagatcacacattatgaactttcaaggacttgtgttaactgacaattgcaaaaatcaatgggtcgttggaccattaataggaaaaggtggattcggtagtatttatactactaatgacaataattatgtagtaaaaatagagcccaaagctaacggatcattatttaccgaacaggcattttatactagagtacttaaaccatccgttatcgaagaatggaaaaaatctcacaatataaagcacgtaggtcttatcacgtgcaaggcatttggtctatacaaatccattaatgtggaatatcgattcttggtaattaatagattaggtgcagatctagatgcggtgatcagagccaataataatagactaccaaaaaggtcggtgatgttgatcggaatcgaaatcttaaataccatacaatttatgcacgagcaaggatattctcacggagatattaaagcgagtaatatagtcttagatcaaatagataagaataaattatatctagtggattacggattggtttctaaattcatgtctaatggcgaacatgttccatttataagaaatccaaataaaatggataacggtactctagaatttacacctatagattcgcataaaggatacgttgtatctagacgtggagatctagaaacacttggatattgtatgattagatggttgggaggtatcttaccatggactaagatatctgaaacaaagaattgtgcattagtaagtgccacaaaacagaaatatgttaacaatactgcgactttgttaatgaccagtttgcaatatgcacctagagaattgctgcaatatattaccatggtaaactctttgacatattttgaggaacccaattacgacaagtttcggcacatattaatgcagggtgtatattattaagtgtggtgtttggtcgataaaaattaaaaaataacttaatttattattgatctcgtgtgtacaaccgaaatcatggcgatgttttacgcacacgctctcggtgggtacgacgagaatcttcatgcctttcctggaatatcatcgactgttgccaatgatgtcaggaaatattctgttgtgtcagtttataataacaagtatgacattgtaaaagacaaatatatgtggtgttacagtcaggtgaacaagagatatattggagcactgctgcctatgtttgagtgcaatgaatatctacaaattggaaatccgatccatgatcaagaaggaaatcaaatctctatcatcacatatcgccacaaaaactactatgctctaagcggaatcgggtacgagagtctagacttgtgtttggaaggagtagggattcatcatcacgtacttgaaacaggaaacgctgtatatggaaaagttcaacatgattattctactatcaaagagaaggccaaagaaatgagtgcacttagtccaggacctatcatcgattaccacgtctggataggagattgtatctgtcaagttactgctgtggacgtacatggaaaggaaattatgaaaatgagattcaaaaagggtgcggtgcttccgatcccaaatctggtaaaagttaaacttggggagaatgatacagaaaatctttcttctactatatcggcggcaccatcgaggtaaccacctctctggaagacagcgtgaatcatgtactcatgaaacgtttggaaactatacgccatatgtggtctgttgtatatgatcattttgatattgtgaatggtaaagaatgctgttatgtgcatacgcattcatctaatcaaaatcctataccgagtactgtaaaaacaaatttgtacatgaagactatgggatcatgcattcaaatggattccatggaagctctagagtatcttagcgaactgaaggaatcaggtggatggagtcccagaccagaaatgcaggaatttgaatatccagatggagtggaagacactgaatcaattgagagattggcagaggagttcttcaatagatcagaacttcaggctggtgaatcagtcaaatttggtaattctattaattgttaaacatacatctgtttcagctaagcaactaagaacacgtatacggcagcagcttccttctatactctcatcttttaccaacacaaagggtggatatttgttcattggagttgataataatacacacaaagtatttggattcacggtgggttacgactacctcagactgatagagaatgatatagaaaagcatatcaaaagacttcgtgttgtgcatttctgtgagaagaaagaggacatcaagtacgcgtgtcgattcatcaaggtatataaacctggggatgagactacctcgacatacgtgtgcgctatcaaagtggaaagatgctgttgtgctgtgtttgcagattggccagaatcatggtatatggatactaatggtatcaagaagtattctccagatgaatgggtgtcacatataaaattttaattaatgtaactatagagaacaaataataaggttgtaatatcatatagacaataactaacaattaattagtaactgttatctcttttttaactaaccaactaactatatacctattaatacatcgtaattatagttcttaacatctattaatcattaattcgcttctttaattttttataaactaacattgttaattgaaaagggataacatgttacagaatataaattatatatggatttttttaaaaaggaaatacttgactggagtatatatttatctcttcattatatagcacgcgtgttttccaatttttccacatcccatataatacaggattataatctcgttcgaacatacgagaaagtggataaaacaatagttgattttttatctaggttgccaaatttattccatattttagaatatggggaaaatattctacatatttattctatggatgatgctaatacgaatattataattttttttctagatagagtattaaatattaataagaacgggtcatttatacacaatctcgggttatcatcatccattaatataaaagaatatgtatatcaattagttaataatgatcatccagataataggataagactaatgcttgaaaatggacgtagaacaagacattttttgtcctatatatcagatacagttaatatctatatatgtattttaataaatcatggattttatatagatgccgaagacagttacggttgtacattattacatagatgtatatatcactataagaaatcagaatcagaatcatacaatgaattaattaagatattgttaaataatggatcagatgtagataaaaaagatacgtacggaaacacaccttttatcctattatgtaaacacgatatcaacaacgtggaattgtttgagatatgtttagagaatgctaatatagactctgtagactttaatagatatacacctcttcattatgtctcatgtcgtaataaatatgattttgtaaagttattaatttctaaaggagcaaatgttaatgcgcgtaataaattcggaactactccattttattgtggaattatacacggtatctcgcttataaaactatatttggaatcagacacagagttagaaatagataatgaacatatagttcgtcatttaataatttttgatgctgttgaatctttagattatctattatccagaggagttattgatattaactatcgtactatatacaacgaaacatctatttacgacgctgtcagttataatgcgtataatacgttggtctatctattaaacaaaaatggtgattttgagacgattactactagtggatgtacatgtatttcggaagcagtcgcaaacaacaacaaaataataatggaagtactattgtctaaacgaccatctttgaaaattatgatacagtctatgatagcaattactaaacataaacagcataatgcagatttattgaaaatgtgtataaaatatactgcgtgtatgaccgattatgatactcttatagatgtacagtcgctacagcaatataaatggtatattttaagatgtttcgatgaaatagatatcatgaagagatgttatataaaaaataaaactgtattccaattagttttttgtatcaaagacattaatactttaatgagatacggtaaacatccttctttcgtgaaatgcactagtctcgacgtatacggaagtcgtgtacgtaatatcatagcatctattagatatcgtcagagattaattagtctattatccaagaagctggatcctggagataaatggtcgtgttttcctaacgaaataaaatataaaatattggaaaactttaacgataacgaactatccacatatctaaaaatcttataaacattattaaaatataaaatctaagtaggataaaatcacactacatcattgtttccttttagtgctcgacagtgtatactatttttaacgctcataaataaaaatgaaaacgatttccgttgttacgttgttatgcgtactacctgctgttgtttattcaacatgtactgtacccactatgaataacgctaaattaacgtctaccgaaacatcgtttaatgataaccagaaagttacgtttacatgtgatcagggatatcattctttggatccaaatgctgtctgtgaaacagataaatggaaatacgaaaatccatgcaaaaaaatgtgcacagtttctgattatgtctctgaactatataataaaccgctatacgaagtgaattccaccatgacactaagttgcaacggcgaaacaaaatattttcgttgcgaagaaaaaaatggaaatacttcttggaatgatactgttacgtgtcctaatgcggaatgtcaacctcttcaattagaacacggatcgtgtcaaccagttaaagaaaaatactcatttggggaatatatgactatcaactgtgatgttggatatgaggttattggtgcttcgtacataagttgtacagctaattcttggaatgttattccatcatgtcaacaaaaatgtgatatgccgtctctatctaacggattaatttccggatctacattttctatcggtggcgttatacatcttagttgtaaaagtggttttacactaacggggtctccatcatccacatgtatcgacggtaaatggaatcccatactcccaatatgtgtacgaactaacgaaaaatttgatccagtggatgatggtcccgacgatgagacagatttgagcaaactctcgaaagacgttgtacaatatgaacaagaaatagaatcgttagaagcaacttatcatataatcatagtggcgttgacaattatgggcgtcatatttttaatctccgttatagtattagtttgttcctgtgacaaaaataatgaccaatataagttccataaattgctaccgtaaatataaatccgttaaaataattaataatttaataacaaacaagtatcaaaagattaaagacttatagctagaatcaattgagatgtcttcttcagtggatgttgatatctacgatgccgttagagcatttttactcaggcactattataacaagagatttattgtgtatggaagaagtaacgccatattacataatatatacaggctatttacaagatgcgccgttataccgttcgatgatatagtacgtactatgccaaatgaatcacgtgttaaacaatgggtgatggatacacttaatggtataatgatgaatgaacgcgatgtttctgtaagcgttggcaccggaatactattcatggaaatgtttttcgattacaataaaaatagtatcaacaatcaactaatgtatgatataattaatagcgtatctataattctagctaatgagagatatagaagcgcttttaacgacgatggtatatacatccgtagaaatatgattaacaagttgtacggatacgcatctctaactactattggcacgatcgctggaggtgtttgttattatctgttgatgcatctagttagtttgtataaataattatttcaatatactagttaaaattttaagattttaaatgtataaaaaactaataacgtttttatttgtaataggtgcattagcatcctattcgaataatgagtacactccgtttaataaactgagtgtaaaactctatatagatggagtagataatatagaaaattcatatactgatgataataatgaattggtgttaaattttaaagagtacacaatttctattattacagagtcatgcgacgtcggatttgattccatagatatagatgttataaacgactataaaattattgatatgtataccattgactcgtctactattcaacgcagaggtcacacgtgtagaatatctaccaaattatcatgccattatgataagtacccttatattcacaaatatgatggtgatgagcgacaatattctattactgcagagggaaaatgctataaaggaataaaatatgaaataagtatgatcaacgatgatactctattgagaaaacatactcttaaaattggatctacttatatatttgatcgtcatggacatagtaatacatattattcaaaatatgatttttaaaaatttaaaatatattatcacttcagtgacagtagtcaaataacaaacaacaccatgagatatattataattctcgcagttttgttcattaatagtatacatgctaaaataactagttataagtttgaatccgtcaattttgattccaaaattgaatggactggggatggtctatacaatatatcccttaaaaattatggcatcaagacgtggcaaacaatgtatacaaatgtaccagaaggaacatacgacatatccgcatttccaaagaatgatttcgtatctttctgggttaaatttgaacaaggcgattataaagtggaagagtattgtacgggactatgcgtcgaagtaaaaattggaccaccgactgtaacattgactgaatacgacgaccatatcaatttgtacatcgagcatccgtatgctactagaggtagcaaaaagattcctatttacaaacgcggtgacatgtgtgatatctacttgttgtatacggctaacttcacattcggagattctaaagaaccagtaccatatgatatcgatgactacgattgcacgtctacaggttgcagcatagactttgtcacaacagaaaaagtgtgcgtgacagcacagggagccacagaagggtttctcgaaaaaattactccatggagttcgaaagtatgtctgacacctaaaaagagtgtatatacatgcgcaattagatccaaagaagatgttcccaatttcaaggacaaaatggccagagttatcaagagaaaatttaatacacagtctcaatcttatttaactaaatttctcggtagcacatcaaatgatgttaccacttttcttagcatgcttaacttgactaaatattcataactaatttttattaatgatacaaaaacgaaataaaactgcatattatacactggttaacgcccttataggctctaaccattttcaagatgaggtccctgattatagtccttctgttcccctctatcatctactccatgtctattagacgatgtgagaagactgaagaggaaacatggggattgaaaatagggttgtgtataattgccaaagatttctatcccgaaagaactgattgcagtgttcatctcccaactgcaagtgaaggattgataactgaaggcaatggattcagggatatacgaaacaccgataaattataaaaaaagcaatgtgtccgctgtttccgttaataatactattttcgtaactggcggattattcataaataactctaatagcacgatcgtggttaacaatatggaaaaacttgacatttataaagacaaacaatggtcgattatagaaatgcctatggctagggtatatcacggcattgactcgacatttggaatgttatattttgccggaggtctatccgttaccgaacaatatggtaatttagagaaaaacaacgagatatcttgttacaatcctagaacgaataagtggtttgatatttcatatactatttataagatatccatatcatcattgtgtaaactaaataacgtcttctatgtatttagtaaggacattggatatgtggaaaagtatgatggtgcatggaagttagtacatgatcgtctccccgctataaaggcattatcaacttctccttattgattgaaaatgaaaatataaatagtttttatgtatagcagtattaccctatagttttattgcttactactaacatggatacagatgttacaaatgtagaagatatcataaatgaaatagatagagagaaagaagaaatactaaaaaatgtagaaattgaaaataataaaaacattaacaagaatcatcccaatgaatatattagagaagcactcgttattaataccagtagtaatagtgattccattgataaagaagttatagaatgtatcagtcacgatgtaggaatatagatcatatctactaatttttataatcgatacaaaacataaaaaacaactcgttattacatagcaggcatggaatccttcaagtattgttttgataacgatggcaagaaatggattatcggaaatactttatattctggtaattcaatactctataaggtcagaaaaaatttcactagttcgttctacaattacgtaatgaagatagatcacaaatcacacaagccattgttgtctgaaatacgattctatatatctgtattggatcctttgactatcgacaactggacacgggaacgtggtataaagtatttggctattccagatctgtatggaattggagaaaccgatgattatatgttcttcgttataaagaattcgggaagagtattcgccccaaaggatactgaatcagtcttcgaagcatgcgtcactatgataaacacgttagagtttatacactctcgaggatttacccatggaaaaatagaaccgaggaatatactgattagaaataaacgtctttcactaattgactattctagaactaacaaactatacaagagtggaaactcacatatagattacaacgaggacatgataacttcaggaaatatcaattatatgtgtgtagacaatcatcttggagcaacagtttcaagacgaggagatttagaaatgttgggatattgcatgatagaatggttcggtggcaaacttccatggaaaaacgaaagtagtataaaagtaataaaacaaaaaaaagaatataaaaaatttatagctactttctttgaggactgttttcctgaaggaaatgaacctctggaattagttagatatatagaattagtatacacgttagattattctcaaactcctaattatgacagactacgtaaactgtttatacaagattgaaattatattcttttttttatagagtgtggtagtgttacggatatctaatattaatattagactatctctatcgcgctacacgaccaatatcgattactatggatatcttctatgaaaggagagaatgtatttatttctccagcgtcaatctcgtcagtattgacaatactgtattatggagctaatggatccactgctgaacagctatcaaaatatgtagaaacggaggagaacacggataaggttagcgctcagaatatctcattcaaatccatgaataaagtatatgggcgatattctgccgtgtttaaagattcctttttgagaaaaattggcgataagtttcaaactgttgacttcactgattgtcgcactatagatgcaatcaacaagtgtgtagatatctttactgaggggaaaatcaatccactattggatgaaccattgtctcctagcaattagtgccgtatactttaaagcaaaatggttgacgccattcgaaaaggaatttaccagtgattatcccttttacgtatctccgacggaaatggtagacgtaagtatgatgtctatgtacggcaaggcatttaatcacgcatctgtaaaagaatcattcggcaacttttcaatcatagaactgccatatgttggagatactagtatgatggtcattcttccagacaagattgatggattagaatccatagaacaaaatctaacagatacaaattttaagaaatggtgtgactttatggatgctatgtttatagatgttcacattcccaagtttaaggtaacaggctcgtataatctggtggatactctagtaaagtcaggactgacagaggtgttcggttcaactggagattatagcaatatgtgtaatttagatgtgagtgtcgacgctatgatccacaaaacgtatatagatgtcaatgaagagtatacagaagcagctgcagcaacttctgtactagtggcagactgtgcatcaacaattacaaatgagttctgtgcagatcatccgttcatctatgtgattaggcatgttgatggaaaaattcttttcgttggtagatattgctctccgacaactaattgttaaccattttttttaaaaaaaatagaaaaaacatgtggtattagtgcaggtcgttgttcttccaattgcaattggtaagatgacggccaactttagtacccacgtcttttcaccacagcactgtggatgtgacagactgaccagtattgatgacgtcaaacaatgtttgactgaatatatttattggtcgtcctatgcataccgcaacaggcaatgcgctggacaattgtattccacactcctctcttttagagatgatgcggaattagtgttcatcgacattcgcgagctggtaaaaaatatgccgtgggatgatgtcaaagattgtacagaaatcatccgttgttatataccggatgagcaaaaaaccatcagagagatttcggccatcatcggactttgtgcatatgctgctacttactggggaggtgaagaccatcccactagtaacagtctgaacgcattgtttgtgatgcttgagatgctaaattacgtggattataacatcatattccggcgtatgaattgatgagttgtacatcttgacattttctttcttctcttctccctttcttctcttctcccttcctccctcttctccctttcccagaaacaaacttttttacccactataaaataaaatgagtatactacctattatatttcttcctatatttttttattcttcattcgttcagacttttaacgcgtctgaatgtatcgacaaagggcaatattttgcatcattcatggagttagaaaacgagccagtaatcttaccatgtcctcaaataaatacgctatcatccggatataatatattagatattttatgggaaaaacgaggagcggataatgatagaattataccgatagataatggtagcaatatgctaattctgaacccgacacaatcagactctggtatttatatatgcattaccacgaacgaaacctactgtgacatgatgtcgttaaatttgacaatcgtgtctgtctcagaatcaaatatagatcttatctcgtatccacaaatagtaaatgagagatctactggcgaaatggtatgtcccaatattaatgcatttattgctagtaacgtaaacgcagatattatatggagcggacatcgacgccttagaaataagagacttaaacaacggacacctggaattattaccatagaagatgttagaaaaaatgatgctggttattatacatgtgttttagaatatatatacggtggcaaaacatataacgtaaccagaattgtaaaattagaggtacgggatagaataataccttctactatgcaattaccagatggcattgtaacttcaataggtagtaatttgactattgcatgcagagtatcgttgagacctcccacaacggacaccgacgtcttttggataagtaatggtatgtattacgaagaagatgatggggacggaaacggtagaataagtgtagcaaataaaatctatatgaccgataagagacgtgttattacatcccggttaaacattaatcctgtcaaggaagaagatgctacaacgtttacgtgtatggcgtttactattcctagcatcagcaaaacagttactgttagtataacgtgaatgtatgttgttacatttccatgtcaattgagtttataagaatttttatacattatcttccaacaaacaattgacgaacgtattgctatgattaactcccacgatactatgcatattattaatcattaacttgcagactatacctagtgctattttgacatactcgtgttcttgtgtaattgcggtatctatattattaaagtacgtaaatctagctatagttttattatttaattttagataatataccgtctccttatttttaaaaattgccacatcctttattaaatcatgaatgggaatttctatgtcatcgttagtatattgtgaacaacaagagcagatatctataggaaagggtggaatgcgatacattgatctatgtagttttaaaacacacgcgaactttgaagaatttatataaatcattccatcgatacatccttctatgttgacatgtatatatccaggaattcttttattaatgtcaggaaatgtataaactaaaacattgcccgaaagcggtgcctctatctgcgttatatccgttcttaacttacaaaatgtaaccaatacctttgcatgacttgttttgttcggcaacgttagtttaaacttgacgaatggattaattacaatagcatgatccgcgcatctattaagtttttttactttaacgcccttgtatgtttttacagagactttatctaaatttctagtgcttgtatgtgttataaatataacgggatatagaaccgaatcacctaccttagatacccaattacattttatcagatccagataataaacaaattttgtcgccctaactaattctatattgttatatattttacaattggttatgatatcatgtaataacttggagtctaacgcgcatcgtcgtacgtttatacaattgtgatttagtgtagtatatctacacatgtatttttccgcactatagtattctggactagtgataaaactatcgttatatctgtcttcaatgaactcatcgagatattgctctctgtcatattcatacacctgcataaactttctagacatcttacaatccgtgttattttaggatcatatttacatatttacgggtatatcaaagatgttagattagttaatgggaatcgtctataataatgaatattaaacaattatatgaggacttttaccacaaagcatcataaaaatgagtcgtcgtctgatttatgttttaaatatcaaccgcaaatcaactcataaaatacaagagaatgaaatatatacatattttagtcattgcaatatagaccatacttctacagaacttgattttgtagttaaaaactatgatctaaacagacgacaacctgtaactgggtatactgcactacactgctatttgtataataattactttacaaacgatgtactgaagatattattaaatcatgacgtaaatgtaacgatgaaaaccagtagcggacgtatgcctgtttatatattgcttactagatgttgtaatatttcacatgatgtagtgatagatatgatagacaaagataaaaaccacttattacatagagactattccaacctattactagagtatataaaatctcgttacatgttattgaaggaagaggatatcgatgagaacatagtatccactttattagataagggaatcgatcctaactttaaacaagacggatatacagcgttacattattattatttgtgtctcgcacacgtttataaactaggtgagtgtagaaaaccgataacgataaaaaaggccaagcgaattatttctttgtttatacaacatggagctaatctaaacgcgttagataattgtggtaatacaccattccatttgtatcttagtattgaaatgtgtaataatattcatatgactaaaatgctgttgacttttaatccgaatttcaaaatatgtaataatcatggattaacgcctatactatgttatataacttccgactacatacaacacgatattcttgttatgttaatacatcactatgaaacaaatgttggagaaatgccgatagatgagcgtcgtatgatcgtattcgagtttatcaaaacatattctacacgtccggcagattcgataacttatttgatgaataggtttaaaaatataaatatttatacccgctatgaaggaaagacattattacacgtagcatgtgaatataataatacacaagtaatagattatcttatacgtatcaacggagatataaatgcgttaaccgacaataacaaacacgctacacaactcattatagataacaaagaaaattccccatataccattaattgtttactgtatatacttagatatattgtagataagaatgtgataagatcgttggtggatcaacttccatctctacctatcttcgatataaaatcatttgagaaattcatatcctactgtatacttttagatgacacattttacgataggcacgttaagaatcgcgattctaaaacgtatcgatacgcattttcaaaatacatgtcgtttgataaatacgatggtataataactaaatgtcacgacgaaacaatgttactcaaactgtccactgttctagacactacactatatgcagttttaagatgtcataattcgagaaagttaagaagatacctcaacgagttaaaaaaatataataacgataagtcctttaaaatatattctaatattatgaatgagagataccttaatgtatattataaagatatgtacgtgtcaaaggtatatgataaactatttcctgttttcacagataaaaattgtctactaacattactaccttcagaaattatatacgaaatattatacatgctgacaattaacgatctttataatatatcgtatccacctaccaaagtatagttgtatttttctcatgcgatgtgtgtaaaaaaactgatattatataaatattttagtgccgtataataaagatgacgatgaaaatgatggtacatatatatttcgtatcattattgttattgctattccacagttacgccatagacatcgaaaatgaaatcacagaattcttcaataaaatgagagatactctaccagctaaagactctaaatggttgaatccagcatgtatgttcggaggcacaatgaatgatatagccgctctaggagagccattcagcgcaaagtgtcctcctattgaagacagtcttttatcgcacagatataaagactatgtggttaaatgggagaggctagaaaagaatagacggcgacaggtttctaataaacgtgttaaacatggtgatttatggatagccaactatacatctaaattcagtaaccgtaggtatttgtgcaccgtaactacaaagaatggtgactgtgttcagggtatagttagatctcatattaaaaaacctccttcatgcattccaaaaacatatgaactaggtactcatgataagtatggcatagacttatactgtggaattctttacgcaaaacattataataatataacttggtataaagataataaggaaattaatatcgacgacattaagtattcacaaacgggaaaggaattaattattcataatccagagttagaagatagcggaagatacgactgttacgttcattacgacgacgttagaatcaagaatgatatcgtagtatcaagatgtaaaatacttacggttataccgtcacaagaccacaggtttaaactaatactagatccgaaaatcaacgtaacgataggagaacctgccaatataacatgcactgctgtgtcaacgtcattattgatcgacgatgtactgattgaatgggaaaatccatccggatggcttataggattcgattttgatgtatactctgttttaactagtagaggcggtatcaccgaggcgaccttgtactttgaaaatgttactgaagaatatataggtaatacatataaatgtcgtggacacaactattattttgaaaaaacccttacaactacagtagtattggagtaaatatacaatgcatttttatatacattactgaattattattactgaattattattactgaattattattaattatatcgtatttgtgctatagaatggatgaagatacgcgactatctaggtatttgtatctcaccgatagagaacatataaatgtagactctattaaacagttgtgtaaaatatcagatcctaatgcatgttatagatgtggatgtacggctttacatgagtacttttataattatagatcagtcaacggaaaatacaagtatagatacaacggttactatcaatattattcatctagcgattatgaaaattataatgaatattattatgatagaactggtatgaacagtgagagtgataatatatcaatcaaaacagaatatgaattctatgatgaaacacaagatcaaagtacacaactagtaggttacgacattaaactcaaaaccaatgaggatgattttatggctatgatagatcagtgggtgtccatgattatatagatgaatcaattaataaagtagtatatggaagagagtctcacgtaagatggcgggatatatggcaagaacataatgatggcgtatacagtataggaaaggagtgcatagataatatatacgaagacaaccataccgtagacgaattctacaagatagacagcgtatcagatgtagatgacgcggaacacatatctccgataactaaaaaaccatagaatcagttgatgataatacctacatttctaatcttccgtataccatcaaatacaaaatattcgagcaacaataagtattttttatacctttaaaactgataaataaattttttctagtgatattttggcaagatgagaatcctatttctcatcgctttcatgtatgggtgtgttcactcatatgttaacgcggttgaaaccaaatgtccaaatctagacattgtaacatcttctggagaatttcattgttcaggatgtgtggaacatatgcctgagtttagctatatgtattggttggcaaaggatatgaaatcggacgaggataccaagtttatagaacatctgggtgatggcatcaaagaagatgaaaccgttcgtaccacagatagtggaatcgtcactctacgtaaagtccttcatgtgactgatactaataaatttgataattataggttcacttgtgtcctcgctacgctagatggcatttataaaaagaatgtttgctgaagtagttgtgtgctactatttttatttatgatataatctaatggaattaatttgaattgatatttatccaatactaaagattatattagaatcaaattaatcttttatacgagaaaaaataacgacatacgtcgtcaacaaattaaactttttatttattagttaactagcttatagaacttgctcattgttatgtttctaaaacgggtacggcatataggacaattatccgacgcaccggtttctcttcgtgttctatgccatatattgatgcatgttatgcaaaatatatgagtacacgaatccaataaaccaaagtatctatcgttttgagtaaacaacttcatagcaaattccacattctttttctttacttactctatacacgtcctcgtatttatttagtattttgatgatatccaactcagaaatggttgttgtattattgggtgtatttggagtataggtattattagctatgtaccaatttaccaaccctcttaatattgattgataatcacatcggttatccaattaataactaaattgtagtgtatatatagaccatatatgtttctatttttttgacagttacgtatagtttcagtaagttttgattgttgtattcctgtatctctagataagttagtcatatagtcccttccggcgatacgttttttccaagcccgaaattgattagccaaatgtgtatttatttttgtgatattgatataatatttcggataatgcatactgttagtcttatatcatttggttcatctatgtattgtaatattgttacatgatctatagatgatgtattgattttggcaggatcgaattccatatccgcgactaaacagtgaaaaaaatgtaaatactttttaaattttaaattagtaaaacttttttttattttttatgattccaaaaatactgaatacaaagtcctaaattataaatatggagatcatactaccacaacttattattatgtatacaaggccggtgtaatagatagatatatataattctattacaccggcagacaattaccgaccggtatttgtcgttaccaacataccgtataatatgtaatatacaattccataacccattgacagttgttatacatcaaaattgcaattcttttgattacgatgttataagaatgtagttaattgatgtatgatgttaatgtgtcctctttcctcttataacatcgtaatcaaaaacttttttataatatatacctaataatgtgtcttaatagttctcgtgattcgtcaaacaatcattcttataaaatataataaagcaacgtaaaaacacataaaaataagcgtaactaataagacaatggatatttacgacgataaaggtctacagactattaaactgtttaataatgaatttgattgtataaggaatgacatcagagaattatttaaacatgtaactgattccgatagtatacaacttccgatggaagacaattctgatattatagaaaatatcagaaaaatactatatagacgattaaaaaatgtagaatgtgttgacatcgataacacaataacttttatgaaatacgatccaaatgatgataataagcgtacgtgttctaattgggtacccttaactaataactatatggaatattgtctagtaatatatttggaaacaccgatatgtggaggcaaaataaaattataccaccctacaggaaatataaagtcggataaggatattatgtttgcaaagactctagactttaaatcaacgaaagtgttaactggacgtaaaacaattgccgttctagacatatccgtttcatataatagatcaatgactactattcactacaacgacgacgttgatatagatatacatactgataaaaatggaaaagagttatgttattgttatataacaatagatgatcattacttggttgatgtggaaactataggagttatagtcaatagatctggaaaatgtctgttagtaaataaccatctaggtataggtatcgttaaagataaacgtataagcgatagttttggagatgtatgtatggatacaatatttgacttttctgaagcacgagagttattttcattaactaatgatgataacaggaatatagcatgggacactgataaactagacgatgatacagatatatggactcccgtcacagaagatgattacaaatttctttctagactagtattgtatgcaaaatctcaatcggatactgtatttgactattatgttcttactggtgatacggaaccacccactgtattcattttcaaggtaactagattttactttaatatgccgaaataaaaaatttttgtataatatctagaggtagaggtattgtttagataaatacaaataacatagatacatcgcatacttagcatttttataaatatacataagacatacactttatacatttttgtaaaaatactcataaaaaaatttataaaaattatggcacaaccatatcttgtataggtagtttagttcgtcgagtgaacctataaacagataatagacaacacataataatgcctactaatacaagcataataccgggagatgggatatatgacgttgtagtgtttgggttttctgaacgttgatagtctactaatactacatgctgacatctaatgcctgtataaccatgagagcatctacaatacataccgtcaatatctctagcgtggatacagtcaccgtgtaaacaatatccatctccctctggaccgcataatctgatagctggaatatctgttgtagcgtttgtaatttctggcaatgtcgtttcgatagcgttaccactatcggcgaatgatctgattatcatagcagcgaacaacaacatcagataatttatcaacatttttgatggattctgtgtttatgctgtttctcagtgtgtgtttatgacaagattgggaattttatattattaattcagtaatataaactaataatatattgttaattgtgtaaataatataaaaataacaatacaatattgaatgtgttgctgttaaaaatgtatgtgttaatataatagaataaaataaatgagtatgatcattttagataacgattgattttatcattaccgcttcattcttatattctttgcttacggaacctatatttagaaacatctactaacaattttttatgcttgcattattaatggtatgtaatatgattgattgtgtacgcaataccaatttgttaagtatgaatacggggtacaaacataaattgaaatttaacattatttatttatgatatatatcgttatcgttaggtctataccatggatatctttaaagaactaatcttaaaacaccctgatgaaaatgttttgatttctccagtttccattttatctactttatctattctaaatcatggagcagctggttctacagctgaacaactatcaaaatatatagagaatatgaatgagaatacacccgatgacaataatgatgacatggaggtagatattccgtattgtgcgacactagctaccgcaaataaaatatacggtagcgatagtatcgagttccacgcctccttcctacaaaaaataaaagacgattttcaaactgtaaactttaataatgctaaccaaacaaaggaactaatcaacgaatgggttaagacaatgacaaatggtaaaattaattccttattgactagtccgctatccattaatactcgtatgacagttgttagcgccgtccattttaaagcaatgtggaaatatccattttctaaacatcttacatatacagacaagttttatatttctaagaatatagttaccagcgttgatatgatggtgggtaccgagaataacttgcaatatgtacatattaatgaattattcggaggattctctattatcgatattccatacgagggaaactctagtatggtaattatactaccggacgacatagaaggtatatataacatagaaaaaaatataacagatgaaaaatttaaaaaatggtgtggtatgttatctactaaaagtatagacttgtatatgccaaagtttaaagtggaaatgacagaaccgtataatctggtaccgattttagaaaatttaggacttactaatatattcggatattatgcagattttagcaagatgtgtaatgaaactatcactgtagaaaaatttctacatacgacgtttatagatgttaatgaggagtatacagaagcatcggccgttacaggagtatttacgattaacttttcgatggtatatcgtacgaaggtctacataaaccatccattcatgtacatgattaaagacaccacaggacgtatactttttatagggaaatactgctatccgcaataaatataaacaaatagacttttataaagagtcttcaacgataagtatatcgacatactacttatgctgcgaaagattctgaacgagaacgactatctcaccctcttggatcatatccgcactgctaaatactaaatctccactacactttttatcatcttatgaggaatgattgccttcgtgaaataggaataattagcaccagaatagctatggattattgtggtagagagtgcactattctatgtcgtctactggatgaagatgtgacgtacaaaaaaataaaactagaaattgaaacgtgtcacaacttatcaaaacatatagatagacgaggaaacaatgcgctacattgttacgtctccaataaatgcgatacagacattaagattgttctctcgcggagtcgagagactttgtagaaacaacgaaggattaactccgctaggagtatacagtaagcatagatacgtaaaatctcagattgtgcatctactgatatccagctattcaaattcctctaacgaactcaagtcgaatataaatgatttcgatctgtattcggataatatcgacttacgtctgctaaaatacctaattgtggataaacggatacgtccgtccaagaatacgaattatgcaatcaatggtctcggattggtggatatatacgtaacgacgcctaatccgagaccagaagtattgctatggcttcttaaatcagaatgttacagcaccggttacgtatttcgtacctgtatgtacgacagtgatatgtgtaagaactctcttcattactatatatcgtctcatagagaatctcaatctctatccaaggatgtaattaaatgtttgatcgataacaatgtttccatccatggcagagacgaaggaggatctttacccatccaatactactggtctttctcaaccatagatatagagattgttaaattattattaataaaggatgtggacacgtgtagagtatacgacgtcagccctatattagaggcgtattatctaaacaagcgatttagagtaaccccatataatgtagacatggaaatcgttaatcttcttattgagagacgtcatactcttgtcgacgtaatgcgtagtattacttcgtacgattccagagaatataaccactacatcatcgataacattctaaagagatttagacaacaggatgaatccatcgtacaagccatactgataaactacttacattacggcgatatggtcgttcgatgcatgttagataacggacaacaactatcctctacacgactactttgttaataataatctcgtcgatgtaaacgtcgtaaggtttatcgtggaaaatatggacacgcggctgtaaatcacgtatcgaacaatggccgtctatgtatgtacggtctgatattatcgagatttaataattgcgggtatcactgttatgaaaccatactgatagatgtatttgatatactaagcaagtacatggatgatatagatatgatcgataactctactatattacgcggtcgatgtcaataatatacaatttgcaaagcggttattggaatatggagcgagtatcacgctcgataatcaatacggccatccagaaaagcagttacagaagagaaaacaaaacgaaatcgttgttctacaagatgtctctccctacgacgattactacgtaaaaaagatactagcctactgcctattaagggacgagtcattcgcggaactacatagtaaattctgtttaaacgaggactataaaagtgtatttatgaaaaatatatcattcgataagatagattccatcatcgtgacataagtcgcctcaaagagattcgaatctccgacaccgacctgtatacggtatcacagctatcttaaagccatacattcagacagtcacatttcatttcccatgtacgacgatctcatagaacagtgccatctatcgatggagcgtaaaagtaaactcgtcgacaaagcactcaataaattagagtctaccatcggtcaatctagactatcgtatttgcctccggaaattatgcgcaatatcatctaaacagtatgttgtacggaaagaaccattacaaatattatccatgatagaaagaaaatatctatatgattggagaagtaggaaacaggaacaagacaacgattactacattattaaatcatgaagtccgtattatactcgtatatattgtttctctcatgtataataataaacggaagagatatagcaccgcatgcaccatccgatggaaagtgtaaagacaacgaatacaaacgccataatttgtgtccgggaacatacgcttccagattatgcgatagcaagactaacacacgatgtacgccgtgtggttcgggtaccttcacatctcgcaataatcatttacccgcttgtctaagttgtaacggaagacgcgatcgtgtaacacgactcacaatagaatctgtgaatgctctcccggatattattgtcttctcaaaggatcatccggatgcaaggcatgtgtttcccaaacaaaatgtggaataggatacggagtatccggagacgtcatctgttctccgtgtggtctcggaacatattctcacaccgtctcttccgcagataaatgcgaacccgtacccagaaatacgtttaactatatcgatgtggaaattaacctgtatccagttaacgacacgtcgtgtactcggacgaccactaccggtctcagcgaatccatctcaacgtcggaactaactattactatgaatcataaagactgtaatcccgtatttcgtgatggatacttctccgttcttaataaggtagcgacttcaggtttctttacaggagaaaggtgtgcactctgaatttcgagattaaatgcaataacaaagattcttcctccaaacagttaacgaaagcaaagaatgatactatcatgccgcattcggagacagtaactctagtgggcgacatctatatactatatagtaataccaatactcaagactacgaaactgatacaatctcttatcatgtgggtaatgttctcgatgtcgatagccatatgcccggtagttgcgatatacataaactgatcactaattccaaacccacccactttttatagtaagtttttcacccataaataataaatacaataattaatttctcgtaaaagtagaaaatatattctaatttattgcacggtaaggaagtagaatcataaagaacagtactcaatcaatagcaattatgaaacaatatatcgtcctggcatgcatgtgcctggcggcagctgctatgcctgccagtcttcagcaatcatcctcatcctcctcctcgtgtacggaagaagaaaacaaacatcatatgggaatcgatgttattatcaaagtcacaaagcaagaccaaacaccgaccaatgataagatttgccaatccgtaacggaaattacagagtccgagtcagatccagatcccgaggtggaatcagaagatgattccacatcagtcgaggatgtagatcctcctaccacttattactccatcatcggtggaggtctgagaatgaactttggattcaccaaatgtcctcagattaaatccatctcagaatccgctgatggaaacacagtgaatgctagattgtccagcgtgtccccaggacaaggtaaggactctcccgcgatcactcatgaagaagctcttgctatgatcaaagactgtgaagtgtctatcgacatcagatgtagcgaagaagagaaagacagcgacatcaagacccatccagtactcgggtctaacatctctcataagaaagtgagttacgaagatatcatcggttcaacgatcgtcgatacaaaatgcgtcaagaatctagagtttagcgttcgtatcggagacatgtgcaaggaatcatctgaacttgaggtcaaggatggattcaagtatgtcgacggatcggcatctgaaggtgcaaccgatgatacttcactcatcgattcaacaaaactcaaagcgtgtgtctgaatcgataactctattcatctgaaattggatgagtagggttaatcgaacgattcaggcacaccacgaattaaaaaagtgtaccggacactatattccggtttgcaaaacaaaaatgttcttaactacattcacaaaaagttacctctcgcgacttcttctttttctgtctcaatagtgtgatacgattatgacactattcctattcctattcctatttcctttcagagtatcacaaaaatattaaacctctttctgatggtctcataaaaaaagttttacaaaaatatttttattctctttctctctttgatggtctcataaaaaaagttttacaaaaatatttttattctctttctctctttgatggtctcataaaaaaagttttacaaaaatatttttattctctttctctctttgatggtctcataaaaaaagttttacaaaaatatttttattctctttctctctttgatggtctcataaaaaaagttttacaaaaatatttttattctctttctctctttgatggtctcataaaaaaagttttacaaaaatatttttattctctttctctctttgatggtctcataaaaaaagttttacaaaaatatttttattctctttctctctttgatggtctcataaaaaaagttttacaaaaatatttttattctctttctctctttgatggtctcataaaaaaagttttacaaaaatatttttattctctttctctctttgatggtctcataaaaaaagttttacaaaaatatttttattctctttctctctttgatggtctcataaaaaaagttttacaaaaatatttttattctctttctctctttgatggtctcataaaaaaagttttacaaaaatatttttattctctttctctctttgatggtctcataaaaaagttttacaaaaatatttttattctctttctctctttgatggtctcataaaaaagttttacaaaaatatttttattctctttctctctttgatggtctcataaaaaaagttttacaaaaatatttttattctctttctctctttgatggtctcataa

SEQ ID NO: 11 - DNA, 201446 bp, Artificial Sequence
  GLV-1h188
ttatgagaccatcaaagagagaaagagaataaaaatatttttgtaaaactttttttatgagaccatcaaagagagaaagagaataaaaatatttttgtaaaacttttttatgagaccatcaaagagagaaagagaataaaaatatttttgtaaaacttttttatgagaccatcaaagagagaaagagaataaaaatatttttgtaaaactttttttatgagaccatcaaagagagaaagagaataaaaatatttttgtaaaactttttttatgagaccatcaaagagagaaagagaataaaaatatttttgtaaaactttttttatgagaccatcaaagagagaaagagaataaaaatatttttgtaaaactttttttatgagaccatcaaagagagaaagagaataaaaatatttttgtaaaactttttttatgagaccatcaaagagagaaagagaataaaaatatttttgtaaaactttttttatgagaccatcaaagagagaaagagaataaaaatatttttgtaaaactttttttatgagaccatcaaagagagaaagagaataaaaatatttttgtaaaactttttttatgagaccatcaaagagagaaagagaataaaaatatttttgtaaaactttttttatgagaccatcaaagagagaaagagaataaaaatatttttgtaaaactttttttatgagaccatcaaagagagaaagagaataaaaatatttttgtaaaactttttttatgagaccatcaaagagagaaagagaataaaaatatttttgtaaaactttttttatgagaccatcagaaagaggtttaatatttttgtgatactctgaaaggaaataggaataggaataggaatagtgtcataatcgtatcacactattgagacagaaaaagaagaagtcgcgagaggtaactttttgtgaatgtagttaagaacatttttgttttgcaaaccggaatatagtgtccggtacacttttttaattcgtggtgtgcctgaatcgttcgattaaccctactcatccaatttcagatgaatagagttatcgattcagacacacgctttgagttttgttgaatcgatgagtgaagtatcatcggttgcaccttcagatgccgatccgtcgacatacttgaatccatccttgacctcaagttcagatgattccttgcacatgtctccgatacgaacgctaaactctagattcttgacgcattttgtatcgacgatcgttgaaccgatgatatcttcgtaactcactttcttatgagagatgttagacccgagtactggatgggtcttgatgtcgctgtctttctcttcttcgctacatctgatgtcgatagacacttcacagtctttgatcatagcaagagcttcttcatgagtgatcgcgggagagtccttaccttgtcctggggacacgctggacaatctagcattcactgtgtttccatcagcggattctgagatggatttaatctgaggacatttggtgaatccaaagttcattctcagacctccaccgatgatggagtaataagtggtaggaggatctacatcctcgactgatgtggaatcatcttctgattccacctcgggatctggatctgactcggactctgtaatttccgttacggattggcaaatcttatcattggtcggtgtttggtcttgctttgtgactttgataataacatcgattcccatatgatgtttgttttcttcttccgtacacgaggaggaggatgaggatgattgctgaagactggcaggcatagcagctgccgccaggcacatgcatgccaggacgatatattgtttcataattgctattgattgagtactgttctttatgattctacttccttaccgtgcaataaattagaatatattttctacttttacgagaaattaattattgtatttattatttatgggtgaaaaacttactataaaaagtgggtgggtttggaattagtgatcagtttatgtatatcgcaactaccgggcatatggctatcgacatcgagaacattacccacatgataagagattgtatcagtttcgtagtcttgagtattggtattactatatagtatatagatgtcgcccactagagttactgtctccgaatgcggcatgatagtatcattctttgctttcgttaactgtttggaggaagaatctttgttattgcatttaatctcgaaattcagagtgcacacctttctcctgtaaagaaacctgaagtcgctaccttattaagaacggagaagtatccatcacgaaatacgggattacagtctttatgattcatagtaatagttagttccgacgttgagatggattcgctgagaccggtagtggtcgtccgagtacacgacgtgtcgttaactggatacaggttaatttccacatcgatatagttaaacgtatttctgggtacgggttcgcatttatctgcggaagagacggtgtgagaatatgttccgagaccacacggagaacagatgacgtctccggatactccgtatcctattccacattttgtttgggaaacacatgccttgcatccggatgatcctttgagaagacaataatatccgggagagcattcacagattctattgtgagtcgtgttacacgatcgcgtcttccgttacaacttagacaagcgggtaaatgattattgcgagatgtgaaggtacccgaaccacacggcgtacatcgtgtgttagtcttgctatcgcataatctggaagcgtatgttcccggacacaaattatggcgtttgtattcgttgtctttacactttccatcggatggtgcatgcggtgctatatctcttccgtttattattatacatgagagaaacaatatatacgagtataatacggacttcatgatttaataatgtagtaatcgttgtcttgttcctgtttcctacttctccaatcatatagatattttctttctatcatggataatatttgtaatggttctttccgtacaacatactgtttagatgatattgcgcataatttccggaggcaaatacgatagtctagattgaccgatggtagactctaatttattgagtgctttgtcgacgagtttacttttacgctccatcgatagatggcactgttctatgagatcgtcgtacatgggaaatgaaatgtgactgtctgaatgtatggctttaagatagctgtgataccgtatacaggtcggtgtcggagattcgaatctctttgaggcgacttatgtcacgatgatggaatctatcttatcgaatgatatatttttcataaatacacttttatagtcctcgtttaaacagaatttactatgtagttccgcgaatgactcgtcccttaataggcagtaggctagtatcttttttacgtagtaatcgtcgtagggagagacatcttgtagaacaacgatttcgttttgttttctcttctgtaactgcttttctggatggccgtattgattatcgagcgtgatactcgctccatattccaataaccgctttgcaaattgtatattattgacatcgaccgcgtaatatagtagagttatcgatcatatctatatcatccatgtacttgcttagtatatcaaatacatctatcagtatggtttcataacagtgatacccgcaattattaaatctcgataatatcagaccgtacatacatagacggccattgttcgatacgtgatttacagccgcgtgtccatattttccacgataaaccttacgacgtttacatcgacgagattattattaacaaagtagtcgtgtagaggatagttgttgtccgttatctaacatgcatcgaacgaccatatcgccgtaatgtaagtagtttatcagtatggcttgtacgatggattcatcctgttgtctaaatctctttagaatgttatcgatgatgtagtggttatattctctggaatcgtacgaagtaatactacgcattacgtcgacaagagtatgacgtctctcaataagaagattaacgatttccatgtctacattatatggggttactctaaatcgcttgtttagataatacgcctctaatatagggctgacgtcgtatactctacacgtgtccacatcctttattaataataatttaacaatctctatatctatggttgagaaagaccagtagtattggatgggtaaagatcctccttcgtctctgccatggatggaaacattgttatcgatcaaacatttaattacatccttggatagagattgagattctctatgagacgatatatagtaatgaagagagttcttacacatatcactgtcgtacatacaggtacgaaatacgtaaccggtgctgtaacattctgatttaagaagccatagcaatacttctggtctcggattaggcgtcgttacgtatatatccaccaatccgagaccattgattgcataattcgtattcttggacggacgtatccgtttatccacaattaggtattttagcagacgtaagtcgatattatccgaatacagatcgaaatcatttatattcgacttgagttcgttagaggaatttgaatagctggatatcagtagatgcacaatctgagattttacgtatctatgcttactgtatactcctagcggagttaatccttcgttgtttctacaaagtctctcgactccgcgagagaacaatcttaatgtctgtatcgcatttattggagacgtaacaatgtagcgcattgtttcctcgtctatctatatgttttgataagttgtgacacgtttcaatttctagttttatttttttgtacgtcacatcttcatccagtagacgacatagaatagtgcactctctaccacaataatccatagctattctggtgctaattattcctatttcacgaaggcaatcattcctcataagatgataaaaagtgtagtggagatttagtatttagcagtgcggatatgatccaagagggtgagatagtcgttctcgttcagaatctttcgcagcataagtagtatgtcgatatacttatcgttgaagactctttataaaagtctatttgtttatatttattgcggatagcagtatttccctataaaaagtatacgtcctgtggtgtctttaatcatgtacatgaatggatggtttatgtagaccttcgtacgatataccatcgaaaagttaatcgtaaatactcctgtaacggccgatgcttctgtatactcctcattaacatctataaacgtcgtatgtagaaatttttctacagtgatagtttcattacacatcttgctaaaatctgcataatatccgaatatattagtaagtcctaaattttctaaaatcggtaccagattatacggttctgtcatttccactttaaactttggcatatacaagtctatacttttagtagataacataccacaccattttttaaatttttcatctgttatatttttttctatgttatatataccttctatgtcgtccggtagtataattaccatactagagtttccctcgtatggaatatcgataatagagaatcctccgaataattcattaatatgtacatattgcaagttattctcggtacccaccatcatatcaacgctggtaactatattcttagaaatataaaacttgtctgtatatgtaagatgtttagaaaatggatatttccacattgctttaaaatggacggcgctaacaactgtcatacgagtattaatggatagcggactagtcaataaggaattaattttaccatttgtcattgtcttaacccattcgttgattagttcctttgtttggttagcattattaaagtttacagtttgaaaatcgtcttttattttttgtaggaaggaggcgtggaactcgatactatcgctaccgtatattttatttgcggtagctagtgtcgcacaatacggaatatctacctccatgtcatcattattgtcatcgggtgtattctcattcatattctctatatattttgatagttgttcagctgtagaaccagctgctccatgatttagaatagataaagtagataaaatggaaactggagaaatcaaaacattttcatcagggtgttttaagattagttctttaaagatatccatggtatagacctaacgataacgatatatatcataaataaataatgttaaatttcaatttatgtttgtaccccgtattcatacttaacaaattggtattgcgtacacaatcaatcatattacataccattaataatgcaagcataaaaaattgttagtagatgtttctaaatataggttccgtaagcaaagaatataagaatgaagcggtaatgataaaatcaatcgttatctaaaatgatcatactcatttattttattctattatattaacacatacatttttaacagcaacacattcaatattgtattgttatttttatattatttacacaattaacaatatattattagtttatattactgaattaataatataaaattcccaatcttgtcataaacacacactgagaaacagcataaacacagaatccatcaaaaatgttgataaattatctgatgttgttgttcgctgctatgataatcagatcattcgccgatagtggtaacgctatcgaaacgacattgccagaaattacaaacgctacaacagatattccagctatcagattatgcggtccagagggagatggatattgtttacacggtgactgtatccacgctagagatattgacggtatgtattgtagatgctctcatggttatacaggcattagatgtcagcatgtagtattagtagactatcaacgttcagaaaacccaaacactacaacgtcatatatcccatctcccggtattatgcttgtattagtaggcattattatgtgttgtctattatctgtttataggttcactcgacgaactaaactacctatacaagatatggttgtgccataatttttataaatttttttatgagtatttttacaaaaatgtataaagtgtatgtcttatgtatatttataaaaatgctaagtatgcgatgtatctatgttatttgtatttatctaaacaatacctctacctctagatattatacaaaaattttttatttcggcatattaaagtaaaatctagttaccttgaaaatgaatacagtgggtggttccgtatcaccagtaagaacataatagtcaaatacagtatccgattgagattttgcatacaatactagtctagaaagaaatttgtaatcatcttctgtgacgggagtccatatatctgtatcatcgtctagtttatcagtgtcccatgctatattcctgttatcatcattagttaatgaaaataactctcgtgcttcagaaaagtcaaatattgtatccatacatacatctccaaaactatcgcttatacgtttatctttaacgatacctatacctagatggttatttactaacagacattttccagatctattgactataactcctatagtttccacatcaaccaagtaatgatcatctattgttatataacaataacataactcttttccatttttatcagtatgtatatctatatcaacgtcgtcgttgtagtgaatagtagtcattgatctattatatgaaacggatatgtctagaacggcaattgttttacgtccagttaacactttcgttgatttaaagtctagagtctttgcaaacataatatccttatccgactttatatttcctgtagggtggtataattttattttgcctccacatatcggtgtttccaaatatattactagacaatattccatatagttattagttaagggtacccaattagaacacgtacgcttattatcatcatttggatcgtatttcataaaagttattgtgttatcgatgtcaacacattctacattttttaatcgtctatatagtatttttctgatattttctataatatcagaattgtcttccatcggaagttgtatactatcggaatcagttacatgtttaaataattctctgatgtcattccttatacaatcaaattcattattaaacagtttaatagtctgtagacctttatcgtcgtaaatatccattgtcttattagttacgcttatttttatgtgtttttacgttgctttattatattttataagaatgattgtttgacgaatcacgagaactattaagacacattattaggtatatattataaaaaagtttttgattacgatgttataagaggaaagaggacacattaacatcatacatcaattaactacattcttataacatcgtaatcaaaagaattgcaattttgatgtataacaactgtcaatgggttatggaattgtatattacatattatacggtatgttggtaacgacaaataccggtcggtaattgtctgccggtgtaatagaattatatatatctatctattacaccggccttgtatacataataataagttgtggtagtatgatctccatatttataatttaggactttgtattcagtatttttggaatcataaaaaataaaaaaaagttttactaatttaaaatttaaaaagtatttacatttttttcactgtttagtcgcggatatggaattcgatcctgccaaaatcaatacatcatctatagatcatgtaacaatattacaatacatagatgaaccaaatgatataagactaacagtatgcattatccgaaatattatatcaatatcacaaaaataaatacacatttggctaatcaatttcgggcttggaaaaaacgtatcgccggaagggactatatgactaacttatctagagatacaggaatacaacaatcaaaacttactgaaactatacgtaactgtcaaaaaaatagaaacatatatggtctatatatacactacaatttagttattaattggataaccgatgtgattatcaatcaatattaagagggttggtaaattggtacatagctaataatacctatactccaaatacacccaataatacaacaaccatttctgagttggatatcatcaaaatactaaataaatacgaggacgtgtatagagtaagtaaagaaaaagaatgtggaatttgctatgaagttgtttactcaaaacgatagatactttggtttattggattcgtgtactcatatattttgcataacatgcatcaatatatggcatagaacacgaagagaaaccggtgcgtcggataattgtcctatatgccgtacccgttttagaaacataacaatgagcaagttctataagctagttaactaataaataaaaagtttaatttgttgacgacgtatgtcgttattttttctcgtataaaagattaatttgattctaatataatctttagtattggataaatatcaattcaaattaattccattagattatatcataaataaaaatagtagcacacaactacttcagcaaacattctttttataaatgccatctagcgtagcgaggacacaagtgaacctataattatcaaatttattagtatcagtcacatgaaggactttacgtagagtgacgattccactatctgtggtacgaacggtttcatcttctttgatgccatcacccagatgttctataaacttggtatcctcgtccgatttcatatcctttgccaaccaatacatatagctaaactcaggcatatgttccacacatcctgaacaatgaaattctccagaagatgttacaatgtctagatttggacatttggtttcaaccgcgttaacatatgagtgaacacacccatacatgaaagcgatgagaaataggattctcatcttgccaaaatatcactagaaaaaatttatttatcagttttaaaggtataaaaaatacttattgttgctcgaatattttgtatttgatggtatacggaagattagaaatgtaggtattatcatcaactgattctatggttttatgtattctatcatgtttcactattgcgttggaaataatatcatatgcttccacatatattttattttgttttaactcataatactcacgtaattctggattattggcatatctatgaataattttagctccatgatcagtaaatattaatgagaacatagtattaccacctaccattatttttttcatctcattcaattcttaattgcaaagatctatataatcattatagcgttgacttatggactctggaatcttagacgatgtacagtcatctataatcatggcatatttaatacattgttttatagcatagtcgttatctacgatgttagatatttctctcaatgaatcaatcacacaatctaatgtaggtttatgacataatagcattttcagcagttcaatgtttttagattcgttgatggcaatggctatacatgtatatccgttatttgatctaatgttgacatctgaaccggattctagcagtaaagatactagagattgtttattatatctaacagccttgtgaagaagtgtttctcctcgtttgtcaatcatgttaatgtctttaagataaggtaggcaaatgtttatagtactaagaattgggcaagcataagacatgtcacaaagacccttttttgtatgtataagtgtaaaaattataacatccatagttggatttacataggtgtccaatcgggatctctccatcatcgagataattgatggcatctcccttccttttttagtagatatttcatcgtgtaagaatcaatattaatatttctaaagtatccgtgtatagcctctttatttaccacagctccatattccactagagggatatcgccgaatgtcatatactcaattagtatatgttggaggacatccgagttcattgttttcaatatcaaagagatggtttccttatcatttctccatagtggtacaatactacacattattccgtgcggctttccattttccaaaaacaatttgaccaaatctaaatctacatctttattgtatctataatcactatttagataatcagccataattcctcgagtgcaacatgttagatcgtctatatatgaataagcagtgttatctattcctttcattaacaatttaacgatgtctatatctatatgagatgacttaatataatattgaagagctgtacaatagtttttatctataaaagacggcttgattccgtgattaattagacatttaacaacttccggacgcacatatgctctcgtatccgactctgaatacagatgagagatgatatacagatgcaatacggtaccgcaatttcgtagttgataatcatcatacgcgtatcagtactcgtcctcataaagaacactgcagccattttctatgaacaaatcaataattttagaaacaggatcattgtcattacataattttctataactgaacgatggttttcacatttaacactcaagtcaaatccatgttctaccaacacctttatcaagtcaacgtctacatttttggatttcatatagctgaatatattaaagttatttatgttgctaaatccagtggcttctagtagagccatcgctatatccttattaactttaacatgtctactatttgtgtattcttctaatggggtaagctgtctccaatttttgcgtaatggattagtgccactgtctagtagtagtttgacgacctcgacattattacaatgctcattaaaaaggtatgcgtgtaaagcattattcttgaattggttcctggtatcattaggatctctgtctttcaacatctgtttaagttcatcaagagccacctcctcattttccaaatagtcaaacattttgactgaatgagctactgtgaactctatacacccacacaactaatgtcattaaatatcatgtcaaaaacttgtacaattattaataaaaataatttagtgtttaaattttaccagttccagattttacacctccgttaatacctccattaaccccactggacgatcctcctccccacattccaccgccaccagatgtataagttttagatcctttattactaccatcatgtccatggataaagacactccacatgccgccactaccccctttagaagacatattaataagacttaaggacaagtttaacaataaaattaatcacgagtaccctactaccaacctacactattatatgattatagtttctatttttacagtaccttgactaaagtttctagtcacaagagcaatactaccaacctacactattatatgattatagtttctatttttataggaacgcgtacgagaaaatcaaatgtctaatttctaacggtagtgttgataaacgattgttatccgcggatacctcctctatcatgtcgtctattttcttactttgttctattaacttattagcattatatattatttgattataaaacttatattgcttattagcccaatctgtaaatatcggattattaacatatcgtttctttgtaggtttatttaacatgtacatcactgtaagcatgtccttaccatttattttaatttgacgcatatccgcaatttctttttcgcagtcggttataaattctatatatgatggatacatgctacatgtgtacttataatcgactaatatgaagtacttgatacatattttcagtaacgatttattattaccacctatgaataagtacctgtgatcgtctaggtaatcaactgttttcttaatacattcgatggttggtaatttactcagaataatttccaatatcttaatatataattctgctatttctgggatatatttatctgccagtataacacaaatagtaatacatgtaaacccatattttgttattatattaatgtctgcgccattatctattaaccattctactaggctgacactatgcgactcaatacaatgataaagtatactacatccatgtttatctattttgtttatatcatcaatatacggcttacaaagttttagtatcgataacacatccaactcacgcatagagaaggtagggaataatggcataatatttattaggttatcatcattgtcattatctacaactaagtttccattttttaaaatatactcgacaactttaggatctctattgccaaatttttgaaaatatttatttatatgcttaaatctatataatgtagctccttcatcaatcatacatttaataacattgatgtatactgtatgataagatacatattctaacaatagatcttgtatagaatctgtatatcttttaagaattgtggatattaggatattattacataaactattacacaattctaaaatataaaacgtatcacggtcgaataatagttgatcaactatataattatcgattttgtgatttttcttcctaaactgtttacgtaaatagttagatagaatattcattagttcatgaccactatagttactatcgaataacgcgtcaaatatttcccgtttaatatcgcatttgtcaagataataatagagtgtggtatgttcacgataagtataataacgcatctctttttcgtgtgaaattaaatagtttattacgtccaaagatgtagcataaccatcttgtgacctagtaataatataataatagagaactgttttacccattctatcatcataatcagtggtgtagtcgtaatcgtaatcgtctaattcatcatcccaattataatattcaccagcacgtctaatctgttctattttgatcttgtatccatactgtatgttgctacatgtaggtattcctttatccaataatagtttaaacacatctacattgggatttgatgttgtagcgtatttttctacaatattaataccatttttgatactatttatttctatacctttcgaaattagtaatttcaataagtctatattgatgttatcagaacatagatattcgaatatatcaaaatcattgatatttttatagtcgactgacgacaataacaaaatcacaacatcgtttttgatattattatttttcttggtaacgtatgcctttaatggagtttcaccatcatactcatataatggatttgcaccactttctatcaatgattgtgcactgctggcatcgatgttaaatgttttacaactatcatagagtatcttatcgttaaccatgattggttgttgatgctatcgcattttttggtttctttcatttcagttatgtatggatttagcacgtttgggaagcatgagctcatatgatttcagtactgtagtgtcagtactattagtttcaataagatcaatctctagatctatagaatcaaaacacgataggtcagaagataatgaatatctgtaggcttcttgttgtactgtaacttctggttttgttagatggttgcatcgtgctttaacgtcaatggtacaaattttatcctcgctttgtgtatcatattcgtccctactataaaattgtatattcagattatcatgcgatgtgtatacgctaacggtatcaataaacggagcacaccatttagtcataaccgtaatccaaaaatttttaaagtatatcttaacgaaagaagttgtgtcattgtctacggtgtatggtactagatcctcataagtgtatatatctagagtaatgtttaatttattaaatggttgataatatggatcctcgtgacaatttccgaagatggaaataagacataaacacgcaataaatctaattgcggacatggttactccttaaaaaaatacgaataatcaccttggctatttagtaagtgtcatttaacactatactcatattaatccatggactcataatctctatacgggattaacggatgttctatatacggggatgagtagttctcttctttaactttatactttttactaatcatatttagactgatgtatgggtaatagtgtttgaagagctcgttctcatcatcagaataaatcaatatctctgtttttttgttatacagatgtattacagcctcatatattacgtaatagaacgtgtcatctaccttattaactttcaccgcatagttgtttgcaaatacggttaatcctttgacctcgtcgatttccgaccaatctgggcgtataatgaatctaaactttaattgcttgtaatcattcgaaataatttttagtttgcatccgtagttatcccctttatgtaactgtaaatttctcaacgcgatatctccattaataatgatgtcgaattcgtgctgtatacccatactgaatggatgaacgaataccgacggcgttaatagtaatttactttttcatctttacatattgggtactagttttactatcataagtttataaattccacaagctactatggaataagccaaccatcttagtataccacacatgtcttaaagtttattaattaattacatgttgttttatatatatcgctacgaatttaaagagaaattagtttaggaagaaaaattatctatctacatcatcacgtctctgtattctacgatagagtgctactttaagatgcgacagatccgtgtcatcaaatatatactccattaaaatgattattccggcagcgaacttgatattggatatatcacaacctttgttaatatctacgacaatagacagcagtcccatggttccataaacagtgagtttatctttctttgaagagatattttgtagagatcttataaaactgtcgaatgacatcgcatttatatctttagctaaatcgtatatgttaccatcgtaatatctaaccgcgtctatcttaaacgtttccatcgctttaaagacgtttccgatagatggtctcatttcatcagtcatactgagccaacaaatataatcgtgtataacatctttgatagaatcagactctaaagaaaacgaatcggctttattatacgcattcatgataaacttaatgaaaaatgtttttcgttgtttaagttggatgaatagtatgtcttaataattgttattatttcattaattaatatttagtaacgagtacactctataaaaacgagaatgacataactaatcataactagttatcaaagtgtctaggacgcgtaattttcatatggtatagatcctgtaagcattgtctgtattctggagctattttctctatcgcattagtgagttcagaatatgttataaatttaaatcgaataacgaacataactttagtaaagtcgtctatattaactcttttattttctagccatcgtaataccatgtttaagatagtatattctctagttactacgatctcatcgttgtctagaatatcacatactgaatctacatccaattttagaaattggtctgtgttacatatctcttctatattattgttgatgtattgtcgtagaaaactattacgtagaccattttctttataaaacgaatatatagtactccaattatctttaccgatatatttgcacacataatccattctctcaatcactacatctttaagattttcgttgttaagatatttggctaaactatataattctattagatcatcaacagaatcagtatatatttttctagatccaaagacgaactctttggcgtcctctataatattcccagaaaagatattttcgtgttttagtttatcgagatctgatctgttcatatacgccatgattgtacggtacgttatgataaccgcataaaataaaaatccattttcatttttaaccaatactattcataattgagattgatgtaatactttgttactttgaacgtaaagacagtacacggatccgtatctccaacaagcacgtagtaatcaaatttggtgttgttaaacttcgcaatattcatcaatttagatagaaacttatactcatcatctgttttaggaatccatgtattattaccactttccaacttatcattatcccaggctatgtttcgtccatcatcgttgcgcagagtgaataattcttttgtattcggtagttcaaatatatgatccatgcatagatcggcaaagctattgtagatgtgatttttcctaaatctaatataaaactcgtttactagcaaacactttcctgatttatcgaccaagacacatatggtttctaaatctatcaagtggtggggatccatagttatgacgcagtaacatatattattacattcttgactgtcgctaatatctaaatatttattgttatcgtattggattctgcatatagatggcttgtatgtcaaagatatagaacacataaccaatttatagtcgcgctttacattctcgaatctaaagttaagagatttagaaaacattatatcctcggatgatgttatcactgtttctggagtaggatatattaaagtctttacagatttcgtccgattcaaataaatcactaaataatatcccacattatcatctgttagagtagtatcattaaatctattatattttatgaaagatatatcactgctcacctctatatttcgtacatttttaaactgtttgtataatatctctctgatacaatcagatatatctattgtgtcggtagacgataccgttacatttgaattaatggtgttccattttacaacttttaacaagttgaccaattcatttctaatagtatcaaactctccatgattaaatattttaatagtatccattttatatcactacggacacaaagtagctgacataaaccattgtataatttttatgttttatgtttattagcgtacacattttggaagttccggcttccatgtatttcctggagagcaagtagatgatgaggaaccagatagtttatatccgtacttgcacttaaagtctacattgtcgttgtatgagtatgatcttttaaacccgctagacaagtatccgtttgatattgtaggatgtggacatttaacaatctgacacgtgggtggatcggaccattctcctcctgaacacaggacactagagttaccaatcaacgaatatccactattgcaactataagttacaacgctcccatcggtataaaaatcctcgtatccgttatgtcttccgttggatatagatggaggggattggcatttaacagattcacaaataggtgcctcgggattccataccatagatccagtagatcctaattcacaatacgatttagattcaccgatcaactgatatccgctattacaagagtacgttatactagagccaaagtctactccaccaatatcaagttggccattatcgatatctcgaggcgatgggcatctccgtttaatacattgattaaagagtgtccatccagtacctgtacatttagcatatataggtcccattttttgctttctgtatccaggtagacatagatattctatagtgtctcctatgttgtaattagcattagcatcagtctccacactattcttaaatttcatattaatgggtcgtgacggaatagtacagcatgatagaacgcatcctattcccaacaatgtcaggaacgtcacgctctccaccttcatatttatttatccgtaaaaatgttatcctggacatcgtacaaataataaaaagcccatatatgttcgctattgtagaaattgtttttcacagttgctcaaaaacgatggcagtgacttatgagttacgttacactttggagtctcatctttagtaaacatatcataatattcgatattacgagttgacatatcgaacaaattccaagtatttgattttggataatattcgtattttgcatctgctataattaagatataatcaccgcaagaacacacgaacatctttcctacatggttaaagtacatgtacaattctatccatttgtcttccttaactatatatttgtatagataattacgagtctcgtgagtaattccagtaattacatagatgtcgccgtcgtactctacagcataaactatactatgatgtctaggcatgggagacttttttatccaacgatttttagtgaaacattccacatcgtttaatactacatatttctcatacgtggtataaactccacccattacatatatatcatcgtttacgaataccgacgcgcctgaatatctaggagtaattaagtttggaagtcttatccatttcgaagtgccgtgtttcaaatattctgccacacccgttgaaatagaaaattctaatcctcctattacatataactttccatcgttaacacaagtactaacttctgattttaacgacgacatattagtaaccgttttccattttttcgttttaagatctacccgcgatacggaataaacatgtctattgttaatcatgccgccaataatgtatagacaattatgtaaaacatttgcattatagaattgtctatctgtattaccgactatcgtccaatattctgttctaggagagtaatgggttattgtggatatataatcagagtttttaatgactactatattatgttttataccatttcgtgtcactggctttgtagatttggatatagttaatcccaacaatgatatagcattgcgcatagtattagtcataaacttgggatgtaaaatgttgatgatatctacatcgtttggatttttatgtatccactttaataatatcatagctgtaacatcctcatgatttacgttaacgtcttcgtgggataagatagttgtcagttcatcctttgataattttccaaattctggatcggatgtcaccgcagtaatattgttgattatttctgacatcgacgcattatatagttttttaattccatatcttttagaaaagttaaacatccttatacaatttgtgaaattaatattatgaatcatagtttttacacatagatctactacaggcggaacatcaattattatggcagcaactagtatcatttctacattgtttatggtgatgtttatcttcttccagcgcatatagtctaatagcgattcaaacgcgtgatagtttataccattcaatataatcgcttcatcctttagatggtgatcctgaatgcgtttaaaaaaattatacggagacgccgtaataatttccttattcacttgtataatttccccattgatagaaaatattacgctttccattcttaaagtactataagtaattatagtataatgtaaacgtttatatattcaatatttttataaaaatcattttgacattaattcctttttaaatttccgtctatcatctatagaaacgtattctatgaatttataaaatgcttttacgtgtcctatcgtaggcgatagaaccgctaaaaagcctatcgaatttctacaaaagaatctgttatatggtatagggagagtataaaacattaaatgtccgtacttattaaagtattcagtagccaatcctaactctttcgaatacttattaatggctcttgttctgtacgaatctatttttttgaacaacggacctagtggtatatcttgttctatgtatctaaaataatgtctgactagatccgttagtttaatatccgcagtcatcttgtctagaatggcaaatctaactgcgggtttaggctttagtttagtttctatatctacatctatgtctttatctaacaccaaaaatataatagctaatattttattacaatcatccggatattcttctacgatctcactaactaatgtttctttggttatactagtatagtcactatcggacaaataaagaaaatcagatgatcgatgaataatacatttaaattcatcatctgtaagatttttgagatgtctcattagaatattattagggttagtactcattatcattcggcagctattacttattttattatttttcaccatatagatcaatcattagatcatcaaaatatgtttcaatcatcctaaagagtatggtgaatgactcttcccatctaatttctgaacgttcaccaatgtctctagccactttggcactaatagcgatcattcgcttagcgtcttctatattattaactggttgatttaatctatctagcaatggaccgtcggacagcgtcattctcatgttcttaatcaatgtacatacatcgccgtcatctaccaattcatccaacaacataagctttttaaaatcatcattataataggtttgatcgttgtcatttctccaaagaatatatctaataagtagagtcctcatgcttagttaacaactattttttatgttaaatcaattagtacaccgctatgtttaatacttattcatattttagtttttaggattgagaatcaatacaaaaattaatgcatcattaattttagaaatacttagtttccacgtagtcaatgaaacatttgaactcatcgtacaggacgttctcgtacaggacgtaactataaaccggtttatatttgttcaagatagatacaaatccgataactttttttacgaattctacgggatccactttaaaagtgtcataccgggttctttttatttttttaaacagatcaatggtgtgatgttgattaggtcttttacgaatttgatatagaatagcgtttacatattctccataatggtcaatcgccatttgttcgtatgtcataaattctttaattatatgacactgtgtattatttagttcatccttgttcattgttaggaatctatccaaaatggcaattatactagaactataggtgcgttgtatacacatattgatgtgtctgtttatacaatccatgatatttggatccatgctactaccttcgggtaaaattgtagcatcatataccatttctagtactttaggttcattattatccattgcagaggacgtcatgatcgaatcataaaaaaatatattatttttatgttattttgttaaaaataatcatcgaatacttcgtaagatactccttcatgaacataatcagttacaaaacgtttatatgaagtaaagtatctacgatttttacaaaagtccggatgcataagtacaaagtacgcgataaacggaataataatagatttatctagtctatctttttctatagctttcatagttagatacatggtctcagaagtaggattatgtaacatcagcttcgataaaatgactgggttatttagtcttacacattcgctcatacatgtatgaccgttaactacagagtctacactaaaatgattgaacaatagatagtctaccattgtttcgtattcagatagtacagcgtagtacatggcatcttcacaaattatatcattgtctaatagatatttgacgcatcttatggatcccacttcaacagccatcttaaaatcatattgctttcctttatcattaataatttctagaacatcatctctatcataaaagatacaaatattaactgtttgatccgtaataacattgctagtcaatagcaatttgttaataagatgcgctgggctcaatgtcttaataagaagtgtaagaggactatctccgaatttgttttgtttattaacatccgttgatggaagtaaaagatctataatgtctacattcttgactgttttagagcatacaatatggagaggtgtatttccatcatgatctggttttgagggactaattcctagtttcatcatccatgagattgtagaagcttttggattgtctgacataagatgtctatgaatatgatttttgccaaatttatccactatcctggcttcgaatccgatggacattatttttttaaacactctttctgaaggatctgtacacgccaacaacggaccacatccttcttcatcaaccgagttgttaatcttggctccatactgtaccaataaatttattctctctatgacttcatcatctgttcccgagagataatatagaggtgttttatgctgtttatcacacgcgtttggatctgcgccgtgcgtcagcagcatcgcgactattctattattattaattttagaagctatatgcaatggataatttccatcatcatccgtctcatttggagagtatcctctatgaagaagttcttcgacaaatcgttcatctagtcctttaattccacaatacgcatgtagaatgtgataattatttccagaaggttcgatagcttgtagcatattcctaaatacatctaaatttttactattatatttggcataaagagatagataatactcggccgacataatgttgtccattgtagtataaaaattaatatttctatttctatttctgtatatttgcaacaatttactctctataacaaatatcataacttagtttttttatgtcaagaaggcactggtttagttcatctataaatgtcacgccataactaccacgcatgccatactcagaattatgataaagatatttatccttggggtgtaggtaatggggattaatctttgttggatcagtctctaagttaacacatgtcacacatgatccatttatagttatatcacacgatgatgatttatgaattgattccggaagatcgctatcgtattttgtggttccacaattcatttccatacatgttattgtcacactaatattatgatgaactttatctagccgctgagtggtaaacaacagaacagatagtttattatctttaccaacaccctcagccgctgccacaaatctctgatccgtatccatgatggtcatgtttatttctagtccgtatccagtcaacactatgttagcatttctgtcgatatagctttcactcatatgacactcaccaataatagtagaattaatgtcgtaatttacaccaatagtgagttcggcggcaaagtaccaataccggtaatcttgtcgaggaggacatatagtattcttgtattctaccgaatacccgagagatgcgatacaaaagagcaagactaatttgtaaaccatcttactcaaaatatgtaacaatagtacgatgcaatgagtaagacaataggaaatctatcttatatacacataattattctatcaattttaccaattagttagtgtaatgttaacaaaaatgtgggagaatctaattagtttttctttacacaattgacgtacatgagtctgagttccttgtttttgctaattatttcatccaatttattattcttgacgatatcgagatcttttgtataggagtcaaacttgtattcaacatgcttttctataatcattttagctatttcggcatcatccaatagtacattttccagattagcagaatagatattaatgtcgtatttgaacagagcctgtaacatctcaatgtctttattatctatagccaatttaatgtccggaatgaagagaagggaattattggtgtttgtcgacgtcatatagtcgagcaagagaatcatcatatccacgtgtccattttttatagtgatgtgaatacaactaaggagaatagccagatcaaaagtagatggtatctctgaaagaaagtaggaaacaatacttacatcattaagcatgacggcatgataaaatgaagttttccatccagttttcccatagaacatcagtctccaatttttcttaacaaacagttttaccgtttgcatgttaccactatcaaccgcataatacaatgcggtgtttcccttgtcatcaaattgtgaatcatccagtccactgaatagcaaaatctttactattttggtatcttccaatgtggctgcctgatgtaatggaaattcattctctagaagatttttcaatgctccagcgttcaacaacgtacatactagacgcacgttattatcagctattgcataatacaaggcactatgtccatggacatccgccttaaatgtatctttactagagagaaagcttttcagctgcttagacttccaagtattaattcgtgacagatccatgtctgaaacgagacgctaattagtgtatattttttcattttttataattttgtcatattgcaccagaattaataatatctttaatagatctgattagtagatacatggctatcgcaaaacaacatatacacatttaataaaaataatatttattaagaaaattcagatttcacgtacccatcaatataaataaaataatgattccttacaccgtacccatattaaggagattccaccttacccataaacaatataaatccagtaatatcatgtctgatgatgaacacaaatggtgtattaaattccagtttttcaggagatgatctcgccgtagctaccataatagtagatgcctctgctacagttccttgttcgtcgacatctatctttgcattctgaaacattttataaatatataatgggtccctagtcatatgtttaaacgacgcattatctggattaaacatactaggagccatcatttcggctatcgacttaatatccctcttattttcgatagaaaatttagggagtttaagattgtacactttattccctaattgagacgaccaatagtctaattttgcagccgtgatagaatctgtgaaatgggtcatattatcacctattgccaggtacatactaatattagcatccttatacggaaggcgtaccatgtcatattctttgtcatcgattgtgattgtatttccttgcaatttagtaactacgttcatcatgggaaccgttttcgtaccgtacttattagtaaaactagcattgcgtgttttagtgatatcaaacggatattgccatatacctttaaaatatatagtattaatgattgcccatagagtattattgtcgagcatattagaatctactacattagacataccggatctacgttctactatagaattaattttattaaccgcatctcgtctaaagtttaatctatataggccgaatctatgatattgttgataatacgacggtttaatgcacacagtattatctacgaaactttgataagttagatcagtgtacgtatatttagatgttttcagcttagctaatcctgatattaattctgtaaatgctggacccagatctctttttctcaaatccatagtcttcaataattctattctagtattacctgatgcaggcaatagcgacataaacatagaaaacgaataaccaaacggtgagaagacaatattatcatcttgaatatttttatacgctactataccggcattggtaaatccttgtagacgataggcggacgctgaacacgctaacgatagtatcaataacgcaatcatgattttatggtattaataattaaccttatttttatgttcggtataaaaaaattattgatgtctacacatccttttgtaattgacatctatatatccttttgtataatcaactctaatcactttaacttttacagttttccctaccagtttatccctatattcaacatatctatccatatgcatcttaacactctctgccaagatagcttcagagtgaggatagtcaaaaagataaatatatagagcataatcattctcgtatactctgccctttattacatcacccgcattgggcaacgaataacaaaatgcaagcatcttgttaacgggctcgtaaattgggataaaaattatgtttttattgtcttatatctattttattcaagagaatattcaggaatttctttttccggttgtatctcgtcgcagtatatatcatttgtacattgtttcatattttttaatagtttacaccttttagtaggactagtatcgtacaattcatagctgtattttgaattccaatcacgcataaaaatatcttccaattgttgacgaagacctaatccatcatccggtgtaatattaatagatgctccacatgtatccgtaaagtaatttcctgtccaatttgaggtacctatataggccgttttatcggttaccatatatttggcatggtttaccctagaatacggaatgggaggatcagcatctggtacaataaatagctttacttctatatttatgtttttagattttagcatagcgatagatcttaaaaagtttctcatgataaacgaagatcgttgccagcaactaatcaatagcttaacggatacttgtctgtctatagcggatcttcttaattcatcttctatataaggccaaaacaaaattttacccgccttcgaataaataatagggataaagttcataacagatacataaacgaatttactcgcatttctaatacatgacaataaagcggttaaatcattggttctttccatagtacatagttgttgcggtgcagaagcaataaatacagagtgtggaacgccgcttacgttaatactaagaggatgatctgtattataatacgacggataaaagtttttccaattatatggtagattgttaactccaagataccagtatacctcaaaaatttgagtgagatccgctgccaagttcctattattgaagatcgcaatacccaattccttgacctgagttagtgatctccaatccatgttagcgcttcctaaataaatatgtgtattatcagatatccaaaattttgtatgaagaactcctcctaggatatttgtaatatctatgtatcgtacttcaactccggccatttgtagtctttcaacatcctttaatggtttgttagatttattaacggctactctaactcgtactcctcttttgggtaattgtacaatctcgtttaatattatcgtgccgaaattcgtacccacttcatccgataaactccaataaaaagatgatatatctagtgtttttgtggtattggatagaatttccctccacatgttaaatgtagacaaatatactttatcaaattgcatacctataggaatagtttctgtaatcactgcgattgtattatccggattcattttatttgttaaaagaataatcctatatcacttcactctattaaaaatccaagtttctatttctttcatgactgattttttaacttcatccgtttccttatgaagatgatgtttggcaccttcataaatttttatttctctattacaatttgcatgttgcatgaaataatatgcacctaaaacatcgctaatcttattgtttgttccctggagtatgagagtcggggggtgttaatcttggaaattatttttctaaccttgttggtagccttcaagacctgactagcaaatccagccttaattttttcatgattgactaatgggtcgtattggtatttataaactttatccatatctctagatactgattctggacatagctttccgactggcgcatttggtgtgatggttcccataagtttggcagctagcagattcagtcttgaaacagcatctgcattaactagaggagacattagaatcattgctgtaaacaagtttggattatcgtaagaggctagctcccatggaatgacccaataagtagatttaatagttaccacgtgctgtaccaaagtcatcaatcatcattttttcaccattacttcttccatgtccaatatgatcatgtgagaatactaaaattcctaacgatgatatgttttcagctagttcgtcataacgtccagaatgtttaccagctccatgacttatgaatactaatgccttaggatatgtaataggtttccaatatttacaatatatgtaatcattgtccagattgaacatacagtttgcactcatgattcacgttatataactatcaatattaacagttcgtttgatgatcatattatttttatgttttattgataattgtaaaaacatacaattaaatcaatatagaggaaggagacggctactgtcttttgtaagatagtcatggcgactaaattagattatgaggatgctgttttttactttgtggatgatgataaaatatgtagtcgcgactccatcatcgatctaatagatgaatatattacgtggagaaatcatgttatagtgtttaacaaagatattaccagttgtggaagactgtacaaggaattgatgaagttcgatgatgtcgctatacggtactatggtattgataaaattaatgagattgtcgaagctatgagcgaaggagaccactacatcaattttacaaaagtccatgatcaggaaagtttattcgctaccataggaatatgtgctaaaatcactgaacattggggatacaaaaagatttcagaatctagattccaatcattgggaaacattacagatttgatgaccgacgataatataaacatcttgatactttttctagaaaaaaaattgaattgatgatataggggtcttcataacgcataattattacgttagcattctatatccgtgttaaaaaaaattatcctatcatgtatttgagagttttatatgtagcaaacatgatagctgtgatgccaataagctttagatattcacgcgtgctagtgttagggatggtattatctggtggtgaaatgtccgttatataatctacaaaacaatcatcgcatatagtatgcgatagtagagtaaacatttttatagtttttactggattcatacatcgtctacccaattcggttataaatgaaattgtcgccaatcttacacccaaccccttgttatccattagcatagtattaacttcgttatttatgtcataaactgtaaatgattttgtagatgccatatcatacatgatattcatgtccctattataatcattactaactttatcacaatatatgttgataatatctatatatgatctagtctttgtgggcaactgtctatacaagtcgtctaaacgttgtttactcatatagtatcgaacagccatcattacatggtcccgttccgttgatagataatcgagtatgttagtggacttgtcaaatctatataccatattttctggaagtggatatacatagtcgtgatcaacattattgctagcctcatcttctatatcctgtactataccattatctatatcatctacataatctatgatattattacacataaacatcgacaacatactattgtttattatctaagtcctgttgatccaaacccttgatctcctctatttgtactatctagagattgtacttcttccagttctggataatatatacgttgatagattagctgagctattctatctccagtatttacattaaacgtacattttccattattaataagaatgactcctatgtttcccctataatcttcgtctattacaccacctcctatatcaatgccttttagtgacagaccagacctaggagctattctaccatagcagaacttaggcatggacatactaatatctgtcttaattaactgtctttctcctggagggatagtataatcgtaagcgctatacaaatcatatccggcagcacccggcgattgcctagtaggagatttagctctgttagtttccttaacaaatctaactggtgagttaatattcatgttgaacataaaactaatattttatttcaaaattatttaccatcccatatattccatgaataagtgtgatgattgtacacttctatagtatctatatacgatccacgataaaatcctcctatcaatagcagtttattatccactatgatcaattctggattatccctcggataaataggatcatctatcagagtccatgtattgctggattcacaataaaattccgcatttctaccaaccaagaataaccttctaccgaacactaacgcgcatgatttataatgaggataataagtggatggtccaaactgccactgatcatgattgggtagcaaatattctgtagttgtatcagtttcagaatgtcctcccattacgtatataacattgtttatggatgccactgctggattacatctaggtttcagaagactcggcatattaacccaagcagcatccccgtggaaccaacgctcaacagatgtgggatttggtagacctcctactacgtataatttattgttagcgggtatcccgctagcatacagtctggggctattcatcggaggaattggaatccaattgtttgatatataatttacagctatagcattgttatgtatttcattgttcatccatccaccgatgagatatactacttctccaacatgagtacttgtacacatatggaatatatctataatttgatccatgttcataggatactctatgaatggatacttgtatgatttgcgtggttgtttatcacaatgaaatattttggtacagtctagtatccattttacattatttatacctctgggagaaagataatttgacctgattacatttttgataaggagtagcagatttcctaatttatttcttcgcctcatataccacttaatgacaaaatcaactacataatcctcatctggaacatttagttcatcgctttctagaataagtttcatagatagataatcaaaattgtctatgatgtcatcttccagttccaaaaagtgtttggcaataaagtttttagtatgacataagagattggatagtccgtattctatacccatcatgtaacactcgacacaatattcctttctaaaatctcgtaagataaagtttatacaagtgtagatgataaattctacagaggttaatatagaagcacgtaataaattgacgacgttatgactatctatatatacctttccagtatatgagtaaataactatagaagttaaactgtgaatgtcaaggtctagacaaacccttgtaactggatctttatttttcgtgtatttttgacgtaaatgtgtgcgaaagtaaggagataactttttcaatatcgtagaattgactattatattgcctcctatggcatcaataattgttttgaatttcttagtcatagacaatgctaatatattcttacagtacacagtattgacaaatatcggcatttatgtttctttaaaagtcaacatctagagaaaaatgattatctttttgagacataactcccattttttggtattcacccacacgtttttcgaaaaaattagtttttccttccaatgatatattttccatgaaatcaaacggattggtaacattataaatttttttaaatcccaattcagaaatcaatctatccgcgacgaattctatatatgttttcatcatttcacaattcattcctataagtttaactggaagagccgcagtaagaaattcttgttcaatggatactgcatctgttataatagatctaacggtttcttcactcggtggatgcaataaatgtttaaacatcaaacatgcgaaatcgcagtgcagaccctcgtctctactaattagttcgttggaaaacgtgagtccgggcattaggccacgctttttaagccaaaatatggaagcgaatgatccagaaaagaaaattccttctactgcagcaaaggcaataagtctctctccataaccggcgctgtcatgtatccacttttgagcccaatcggccttcttttttacacaaggcatcgtttctatggcattaaagagatagtttttttcattactatctttaacataagtatcgatcaaaagactatacatttccgaatgaatgttttcaatggccatctgaaatccgtagaaacatctagcctcggtaatctgtacttctgtacaaaatcgttccgccaaattttcattcactattccgtcactggctgcaaaaaacgccaatacatgttttataaaatatttttcgtctggtgttagtttattccaatcattgatatctttagatatatctacttcttccactgtccaaaatgatgcctctgcctttttatacatgttccagatgtcatgatattggattgggaaaataacaaatctatttggatttggtgcaaggatgggttccataactaaattaacaataacaataaattttttttcagttatctatatgcctgtacttggattttttgtacatcgatatcgccgcaatcactacaataattacaagtattattgatagcattgttattagtactatcataattaaattatctacattcatgggtgctgaataatcgttattatcatcattatcattttgtaattgtgacatcatactagataaatcgtttgcgagattgttgtgggaagcgggcatggaggatgcattatcattattatttaacgccttccatttggattcacaaatgttacgcacattcaacattttatggaaactataattttgtgaaaacaaataacaagaaaactcgtcatcgttcaaatttttaacgatagtaaaccgattaaacgtcgagctaatttctaacgctagcgactctgttggatatgggtttccagatatatatcttttcagttcccctacgtatctataatcatctgtaggaaatggaagatatttccatttatctactgttcctaatatcatatgtggtggtgtagtagaaccattaagcgcgaaagatgttatttcgcatcgtattttaacttcgcaataatttctggttagataacgcactctaccagtcaagtcaatgatattagcctttacagatatattcatagtagtcgtaacgatgactccatcttttagatgcgatactcctttgtatgtaccagaatcttcgtacctcaaactcgatatatttaaacaagttaatgagatattaacgcgttttatgaatgatgatatataaccagaagttttatcctcggtggctagcgctataaccttatcattataataccaactagtgtgattaatatgtgacacgtcagtgtgggtacaaatatgtacattatcgtctacgtcgtattcgatacatccgcatacagccaacaaatataaaatgacaaatactctaacgccgttcgtacccatcttgatgcggtttaataaatgttttgatttcaatttattgtaaaaaaagattcggttttatactgttcgatattctcattgcttatattttcatctatcatctccacacagtcaaatccgtggttagcatgcacctcatcaaccggtaaaagactatcggactcttctatcattataactctagaatatttaatttggtcattattaatcaagtcaattatcttatttttaacaaacgtgagtattttactcattttttataaaaacttttagaaatatacagactctatcgtgtgtctatatcttctttttatatccaatgtatttatgtctgatttttcttcatttatcatatataatggtccaaattctacacgtgcttcggattcatccagatcattaaggttcttataattgtaacatccttctcttccctcttctacatcttccttcttattcttattcttagcgtcacagaatctaccacagcaggatcccatgacgagcgtcatattaaactaatccattttcaattataatatatgattagtaatgaccattaaaataaaaaatattcttcataaccggcaagaaagtgaaaagttcacattgaaactatgtcagtagtatacatcatgaaatgatgatatatatatactctattttggtggaggattatatgatataattcgtggataatcatttttaagacacatttctttattcgtaaatcttttcacgttaaatgagtgtccatattttgcaatttcttcatatgatggcggtgtacgtggacgaggctgctcctgttcttgttgtggtcgccgactgtcgtgtctgcgtttagatccctccattatcgcgattgcgtagatggagtactattttataccttgtaattaaatttttttattaattaaacgtataaaaacgttccgtatctgtatttaagagccagatttcgtctaatagaacaaatagctacagtaaaaataactagaataattgctacacccactagaaaccacggatcgtaatacggcaatcggttttcgataataggtggaacgtatattttatttaaggacttaacaattgtctgtaaaccacaatttgcttccgcggatcctgtattaactatctgtaaaagcatatgttgaccgggcggagccgaacattctccgatatctaatttctgtatatctataatattattaacctccgcatacgcattacagttcttttctagcttggataccgcactaggtacatcgtctagatctattcctatttcctcagcgatagctcttctatccttttccggaagcaatgaaatcacttcaataaatgattcaaccatgagtgtgaaactaagtcgagaattactcatgcatttgttagttattcggagcgcgcaatttttaaactgtcctataacctctcctatatgaatagcacaagtgacattagtagggatagaatgttgagctaatttttgtaaataactatctataaaaagattatacaaagttttaaactctttagtttccgccatttatccagtctgagaaaatgtctctcataataaatttttccaagaaactaattgggtgaagaatggaaacctttaatctatatttatcacagtctgttttggtacacatgatgaattcttccaatgccgtactaaattcgatatctttttcgatttctggatatgtttttaataaagtatgaacaaagaaatggaaatcgtaataccagttatgtttaactttgaaattgttttttattttcttgttaatgattccagccacttgggaaaagtcaaagtcgtttaatgccgatttaatacgttcattaaaaacaaactttttatcctttagatgaattattattggttcattggaatcaaaaagtaagatattatcgggtttaagatctgcgtgtaaaaagttgtcgcaacagggtagttcgtagattttaatgtataacagagccatctgtaaaaagataaactttatgtattgtaccaaagatttaaatcctaatttgatagctaactcggtatctactttatctgccgaatacagtgctaggggaaaaattataatgtttcctctttcatattcgtagttagttctcttttcatgttcgaaaaagtgaaacatgcggttaaaatagtttataacattaatattactgttaataactgccggataaaagtgggatagtaatttcacgaatttgatactgtcctttctctcgttaaacgcctttaaaaaaactttagaagaatatctcaatgagagttcctgaccatccatagtttgtatcaataatagcaacatatgaagaacacgtttatacagagtatgtaaaaatgttaatttatagtttaatcccatggcccacgcacacacgattaattttttttcatctccctttagattgttgtatagaaatttgggtactgtgaactccgccgtagtttccatgggactatataattttgtggcctcgaatacaaattttactacatagttatctatcttaaagactataccatatcctcctgtagatatgtgataaaaatcgtcgtttataggataaaatcgtttatccttttgttggaaaaaggatgaattaatgtaatcattctcttctatctttagtagtgtttccttattaaaattcttaaaataatttaacaatctaactgacggagcccaattttggtgtaaatctaattgggacattatattgttaaaatacaaacagtctcctaatataacagtatctgataatctatggggagacatccattgatattcaggggatgaatcattggcaacacccatttattgtacaaaaagccccaatttacaaacgaaagtccaggtttgatagagacaaacaattaactattttgtctctgtttttaacacctccacagtttttaatttctttagtaatgaaattattcacaatatcagtatcttctttatctaccagagattttactaacttgataaccttggctgtctcattcaatagggtagtaatatttgtatgtgtgatattgatatctttttgaattgtttcttttagaagtgattctttgatggtgccagcatacgaattacaataatgcagaaactcggttaacatgcaggaattatagtaagccaattccaattgttgcctgtgttgtattagagtgtcaatatgagcaatggtgtccttgcgtttctctgatagaatgcgagcagcgattttggcgttatcatttgacgatatttctggaatgacgaatcctgtttctactaactttttggtaggacaaagtgaaacaatcaagaagatagcttctcctcctatttgtggaagaaattgaactcctctagatgatctactgacgatagtatctccttgacagatattggaccgaattacagaagtacctggaatgtaaagccctgaaaccccctcattttttaagcagattgttgccgtaaatcctgcactatgcccaagatagagagctcctttggtgaatccatctctatgtttcagtttaaccaagaaacagtcagctggtctaaaatttccatctctatctaatacagcatctaacttgatgtcaggaactatgaccggtttaatgttatatgtaacattgagtaaatccttaagttcataatcatcactgtcatcagttatgtacgatccaaacaatgtttctaccggcatagtggatacgaagatgctatccatcagaatgtttccctgattagtattttctatatagctattcttctttaaacgattttccaaatcagtaactatgttcatttttttaggagtaggacgcctagccagtatggaagaggattttctagatcctctcttcaacatctttgatctcgatggaatgcaaaaccccatagtgaaacaaccaacgataaaaataatattgtttttcactttttataattttaccatctgactcatggattcattaatatctttataagagctactaacgtataattctttataactgaactgagatatatacaccggatctatggtttccataattgagtaaatgaatgctcggcaataactaatggcaaatgtatagaacaacgaaattatactagagttgttaaagttaatattttctatgagctgttccaataaattatttgttgtgactgcgttcaagtcataaatcatcttgatactatccagtaaaccgtttttaagttctggaatattatcatcccattgtaaagcccctaattcgactatcgaatatcctgctctgatagcagtttcaatatcgacggacgtcaatactgtaataaaggtggtagtattgtcatcatcgtgataaactacgggaatatggtcgttagtaggtacggtaactttacacaacgcgatatataactttccttttgtaccatttttaacgtagttgggacgtcctgcagggtattgttttgaagaaatgatatcgagaacagatttgatacgatatttgttggattcctgattattcactataatataatctagacagatagatgattcgataaatagagaaggtatatcgttggtaggataatacatccccattccagtattctcggatactctattgatgacactagttaagaacatgtcttctattctagaaaacgaaaacatcctacatggactcattaaaacttctaacgctcctgattgtgtctcgaatgcctcgtacaaggatttcaaggatgccatagattctttgaccaacgatttagaattgcgtttagcatctgatttttttattaaatcgaatggtcggctctctggtttgctaccccaatgataacaatagtcttgtaaagataaaccgcaagaaaatttatacgcatccatccaaataaccctagcaccatcggatgatattaatgtattattatagattttccatccacaattattgggccagtatactgttagcaacggtatatcgaatagattactcatgtaacctactagaatgatagttcgtgtactagtcataatatctttaatccaatctaaaaaatttaaaattagattttttacactgttaaagttaacaaaagtattacccgggtacgtggatatcatatatggcattggtccattatcagtaatagctccataaactgatacggcgatggtttttatatgtgtttgatctaacgaggaagaaattcgcgcccacaattcatctctagatatgtatttaatatcaaacggtaacacatcaatttcgggacgcgtatatgtttctaaatttttaatccaaatataatgatgacctatatgccctattatcatactgtcaactatagtacacctagggaacttacgatacatctgtttcctataatcgttaaattttacaaatctataacatgctaaaccttttgacgacagccattcattaatttctgatatggaatctgtattctcgataccgtatcgttctaaagccagtgctatatctccctgttcgtgggaacgctttcgtataatatcgatcaacggataatctgaagtttttggagaataatatgactcatgatctatttcgtccataaacaatctagacataggaattggaggcgatgatcttaattttgtgcaatgagtcgtcaatcctataacttctaatcttgtaatattcatcatcgacataatactatctatgttatcatcgtatattagtataccatgaccttcttcatttcgtgccaaaatgatatacagtcttaaatagttacgcaatatctcaatagtttcataattgttagctgttttcatcaaggtttgtatcctgtttaacatgatggcgttctataacgtctctattttctatttttaattttttaaatttttaacgatttactgtggctagatacccaatctctctcaaatatttttttagcctcgcttacaagctgtttatctatactattaaaactgacgaatccgtgattttggtaatgggttccgtcgaaatttgccgaagtgatatgaacatattcgtcgtcgactatcaacaattttgtattattctgaatagtgaaaaccttcacagatagatcattttgaacacacaacgcatctagacttttggcggttgccatagaatatacgtcgttcttatcccaattaccaactagaagtctgatcttaactcctctattaatggctgcttctataatggagttgtaaatgtcgggccaatagtagctattaccgtcgacacgtgtagtgggaactatggccaaatgttcaatatctatactagtcttagctgacctgagtttatcaataactacatcggtatctagatctctagaatatcccaataggtgttccggagaatcagtaaagaacactccacctataggattcttaatatgatacgcagtgctaactggcaaacaacaagccgcagagcataaattcaaccatgaattttttgcgctattaaaggctttaaaagtatcaaatcttctacgaagatctgtggccagcgggggataatcagaatatacacctaacgttttaatcgtatgtatagatcctccagtaaatgacgcgtttcctacataacatctttcatcatctgacacccaaaaacaaccgagtagtagtcccacattattttttttatctatattaacggttataaaatttatatccgggcagtgactttgtagctctcccagatttcttttccctcgttcatctagcaaaactattattttaatccctttttcagatgcctcttttagtttatcaaaaataagcgctcccctagtcgtactcagaggattacaacaaaaagatgctatgtatatatatttcttagctagagtgataatttcgttaaaacattcaaatgttgttaaatgatcggatctaaaatccatattttctggtagtgtttctaccagcctacattttgctcccgcaggtaccgatgcaaatggccacatttagttaacataaaaacttatacatcctgttctatcaacgattctagaatatcatcggctatatcgctaaaattttcatcaaagtcgacatcacaacctaactcagtcaatatattaagaagttccatgatgtcatcttcgtctatttctatatccgtatccattgtagattgttgaccgattatcgagtttaaatcattactaatactcaatccttcagaatacaatctgtgtttcattgtaaatttataggcggtgtatttaagttggtagattttcaattatgtattaatatagcaacagtagttcttgctcctccttgattctagcatcctcttcattattttcttctacgtacataaacatgtccaatacgttagacaacacaccgacgatggcggccgcagatctcgagttatgatctacttccttaccgtgcaataaattagaatatattttctacttttacgagaaattaattattgtatttattatttatgggtgaaaaacttactataaaaagcgggtgggtttggaattagtgaaagcttaaaaattgaaattttattttttttttttggaatataaataagctcgaagtcgacagatctaggcctggtaccaggaggaggaattcagcttaaagatgacttcgaaagtttatgatccagaacaaaggaaacggatgataactggtccgcagtggtgggccagatgtaaacaaatgaatgttcttgattcatttattaattattatgattcagaaaaacatgcagaaaatgctgttatttttttacatggtaacgcggcctcttcttatttatggcgacatgttgtgccacatattgagccagtagcgcggtgtattataccagatcttattggtatgggcaaatcaggcaaatctggtaatggttcttataggttacttgatcattacaaatatcttactgcatggtttgaacttcttaatttaccaaagaagatcatttttgtcggccatgattggggtgcttgtttggcatttcattatagctatgagcatcaagataagatcaaagcaatagttcacgctgaaagtgtagtagatgtgattgaatcatgggatgaatggcctgatattgaagaagatattgcgttgatcaaatctgaagaaggagaaaaaatggttttggagaataacttcttcgtggaaaccatgttgccatcaaaaatcatgagaaagttagaaccagaagaatttgcagcatatcttgaaccattcaaagagaaaggtgaagttcgtcgtccaacattatcatggcctcgtgaaatcccgttagtaaaaggtggtaaacctgacgttgtacaaattgttaggaattataatgcttatctacgtgcaagtgatgatttaccaaaaatgtttattgaatcggatccaggattcttttccaatgctattgttgaaggcgccaagaagtttcctaatactgaatttgtcaaagtaaaaggtcttcatttttcgcaagaagatgcacctgatgaaatgggaaaatatatcaaatcgttcgttgagcgagttctcaaaaatgaacaagcggccgccgccaccatgagcaagggcgaggaactgttcactggcgtggtcccaattctcgtggaactggatggcgatgtgaatgggcacaaattttctgtcagcggagagggtgaaggtgatgccacatacggaaagctcaccctgaaattcatctgcaccactggaaagctccctgtgccatggccaacactggtcactaccttcacctatggcgtgcagtgcttttccagatacccagaccatatgaagcagcatgactttttcaagagcgccatgcccgagggctatgtgcaggagagaaccatctttttcaaagatgacgggaactacaagacccgcgctgaagtcaagttcgaaggtgacaccctggtgaatagaatcgagctgaagggcattgactttaaggaggatggaaacattctcggccacaagctggaatacaactataactcccacaatgtgtacatcatggccgacaagcaaaagaatggcatcaaggtcaacttcaagatcagacacaacattgaggatggatccgtgcagctggccgaccattatcaacagaacactccaatcggcgacggccctgtgctcctcccagacaaccattacctgtccacccagtctgccctgtctaaagatcccaacgaaaagagagaccacatggtcctgctggagtttgtgaccgctgctgggatcacacatggcatggacgagctgtacaagtgagcggccgccctgctagcaagcttgctagcggccgctcgagatctgcggccgctacagacacgaatatgactaaaccgatgaccatttaaaaacccctctctagctttcacttaaactgtatcgatcattcttttagcacatgtataatataaaaacattattctatttcgaatttaggcttccaaaaatttttcatccgtaaaccgataataatatatatagacttgttaatagtcggaataaatagattaatgcttaaactatcatcatctccacgattagagatacaatatttacattctttttgctgtttcgaaactttatcaatacacgttaatacaaacccaggaaggagatattgaaactgaggctgttgaaaatgaaacggtgaatacaataattcagataatgtaaaatcatgattccgtattctgatgatattagaactgctaatggatgtcgatggtatgtatctaggagtatctattttaacaaagcatcgatttgctaatatacaattatccttttgattaattgttattttattcatattcttaaaaggtttcatatttatcaattcttctacattaaaaatttccatttttaatttatgtagccccgcaatactcctcattacgtttcattttttgtctataatatccattttgttcatctcggtacatagattatccaattgagaagcgcatttagtagttttgtacattttaagtttattgacgaatcgtcgaaaactagttatagttaacattttattatttgataccctgatattaatacccctgccgttactattatttataactgatgtaatccacgtaacattggaattaactatcgatagtaatgcatcgacgcttccaaaattgtctattataaactcaccgataatttttttattgcatgttttcatattcattaggattatcaaatctttaatcttattacgattgtatgcgttgatattacaagacgtcattctaaaagacggaggatctccatcaaatgccagacaatcacgtacaaagtacatggaaataggttttgttctattgcgcatcatagatttatatagaacacccgtagaaatactaatttgttttactctataaaatactaatgcatctatttcatcgttttgtataacgtctttccaagtgtcaaattccaaatttttttcattgatagtaccaaattcttctatctctttaactacttgcatagataggtaattacagtgatgcctacatgccgttttttgaaactgaatagatgcgtctagaagcgatgctacgctagtcacaatcaccactttcatatttagaatatatatatgtaaaaatatagtagaatttcattttgtttttttctatgctataaatgaattctcattttgcatctgctcatactccgttttatattaataccaaagaaggaagatatctggttctaaaagccgttaaagtatgcgatgttagaactgtagaatgcgaaggaagtaaagcttcctgcgtactcaaagtagataaaccctcatcgcccgcgtgtgagagaagaccttcgtccccgtccagatgcgagagaatgaataaccctggaaaacaagttccgtttatgaggacggacatgctacaaaatatgttcgcggctaatcgcgataatgtagcttctagacttttgtcctaaaatactattatatccttttcgatattaataaatccgtgtcgtccaggttttttatctctttcagtatgtgaatagataggtattttatctctattcatcatcgaatttaagagatccgataaacattgtttgtattctccagatgtcagcatctgatacaacaatatatgtgcacataaacctctggcacttatttcatgtaccttccccttatcactaaggagaatagtatttgagaaatatgtatacatgatattatcatgaattagatatacagaatttgtaacactctcgaaatcacacgatgtgtcggcgttaagatctaatatatcactcgataacacattttcatctagatacactagacattttttaaagctaaaatagtctttagtagtaacagtaactatgcgattattttcatcgatgatacatttcatcggcatattattacgcttaccatcaaagactataccatgtgtatatctaacgtattctagcatggttgccatacgcgcattaaacttttcaggatctttggatagatcttccaatctatctatttgagaaaacatttttatcatgttcaatagttgaaacgtcggatccactatatagatattatctataaagattttaggaactacgttcatggtatcctggcgaatattaaaactatcaatgatatgattatcgttttcatcttttatcaccatatagtttctaagatatgggattttacttaatataatattatttcccgtgataaattttattagaaaggccaaatctataagaaaagtcctagaattagtctgaagaatatctatatcgccgtatagtatatttggattaattagatatagagaatatgatccgtaacatatacaacttttattatggcgtctaagatattcttccatcaacttattaacatttttgactagggaagatacattatgacgtcccattacttttgccttgtctattactgcgacgttcatagaatttagcatatctcttgccaattcttccattgatgttacattataagaaattttagatgaaattacatttggagctttaatagtaagaactcctaatatgtccgtgtatgtggtcactaatacagattgtagttctataatcgtaaataatttacctatattatatgtttgagtctgtttagaaaagtagctaagtatacgatcttttatttctgatgcagatgtattaacatcggaaaaaaatctttttttattcttttttactaaagatacaaatatgtctttgttaaaaacagttattttctgaatatttctagcttgtaattttaacatatgatattcgttcacactaggtactctgcctaaataggtttctataatctttaatgtaatattaggaaaagtattctgatcaggattcctattcattttgaggatttaaaactctgattattgtctaatatggtctctacgcaaactttttcacagagcgatagagtttttgataactcgtttttcttaagaaatataaaactactgtctccagagctcgctctatcttttattttatctaattcgatacaaactcctgatactggttcagaaagtaattcattaattttcagtcctttatagaagatatttaatatagataatacaaaatcttcagtttttgatatcgatctgattgatcctagaactagatatattaataacgtgctcattaggcagtttatggcagcttgataattagatatagtatattccagttcatatttattagataccgcattgcccagattttgatattctatgaattcctctgaaaataaatccaaaataactagacattctattttttgtggattagtgtactctcttccctctatcatgttcactactggtgtccacgatgataaatatctagagggaatataatatagtccataggatgccaatctagcaatgtcgaataactgtaattttattcttcgctcttcattatgaattgattcttgaggtataaacctaacacaaattatattattagacttttcgtatgtaatgtctttcatgttataagtttttaatcctggaatagaatctattttaatgaggcttttaaacgcagagttctccaacgagtcaaagcataatactctgttgtttttcttatatacgatgttacgattttcttctttgaatggaataggtttttgaattagtttataattacaacataatagataaggaagtgtgcaaatagtacgcggaaaaaacataatagctcccctgttttcatccatggttttaagtaaatgatcactggcttctttagtcaatggatattcgaacattaaccgtttcatcatcattggacagaatccatatttcttaatgtaaagagtgatcaaatcattgtgtttattgtaccatcttgttgtaaatgtgtattcggttatcggatctgctcctttttctattaaagtatcgatgtcaatctcgtctaagaattcaactatatcgacatatttcatttgtatacacataaccattactaacgtagaatgtataggaagagatgtaacgggaacagggtttgttgattcgcaaactattctaatacataattcttctgttaatacgtcttgcacgtaatctattatagatgccaagatatctatataattattttgtaagatgatgttaactatgtgatctatataagtagtgtaataattcatgtattttgatatatgttccaactctgtctttgtgatgtctagtttcgtaatatctatagcatcctcaaaaaatatattcgcatatattcccaagtcttcagttctatcttctaaaaaatcttcaacgtatggaatataataatctattttacctcttctgatatcattaatgatatagtttttgacactatcttctgtcaattgattcttattcactatatctaagaaacggatagcgtccctaggacgaactactgccattaatatctctattatagcttctggacataattcatctattataccagaattaatgggaactattccgtatctatctaacatagttttaagaaagtcagaatctaagacttgatgttcatatattggttcatacatgaaatgatctctattgatgatagtgactatttcattctctgaaaattggtaactcattctatatatgctttccttgttgatgaaggatagaatatactcaatagaatttgtaccaacaaactgttctcttatgaatcgtatatcatcatctgaaataatcatgtaaggcatacatttaacaattagagacttgtctcctgttatcaatatactattcttgtgataatttatgtgtgaggcaaatttgtccacgttctttaattttgttatagtagatatcaaatccaatggagctacagttcttggcttaaacagatatagtttttctggaacaaattctacaacattattataaaggactttgggtagataagtgggatgaaatcctattttaattaatgcgatagccttgtcctcgtgcagatatccaaacgcttttgtgatagtatggcattcattgtctagaaacgctctacgaatatctgtgacagatatcatctttagagaatatactagtcgcgttaatagtactacaatttgtattttttaatctatctcaataaaaaaattaatatgtatgattcaatgtataactaaactactaactgttattgataactagaatcagaatctaatgatgacgtaaccaagaagtttatctactgccaatttagctgcattatttttagcatctcgtttagattttccatcggccttatcgaatactcttccgtcgatgtctacacaggcataaaatgtaggagagttactaggcccaactgattcaatacgaaaagaccaatctctcctagtaatttggcagtactcattaataacggtgacagggttagcatctttccaatcaataatttttttagccggaataacatcatcaaaagacttatgatcctctctcattgatttttcgcgggatacatcatctattatgacgtcagccatagcatcagcatccggcttatccgcctccgttgtcataaaccaacgaggaggaatatcgtcggagctgtacaccatagcactacgttgaagatcgtacagagctttattaacttctcgcttctccatattaagttgtctagttagttgtgcagcagtagctccttcgattccaatgtttttaatagccgcacacacaatctctgcgtcagaacgctcgtcaatatagatcttagacatttttagagagaactaacgcaaccagcaataaaactgaacctactttatcatttttttattcatcatcctctggtggttcgtcgttcctatcaaatgtagctctgattaacccgtcatctataggtgatgctggttctggagattctggaggagatggattattatctggaagaatctctgttatttccttgttttcatgtatcgattgcgttgtaacattaagattgcgaaatgctctaaatttgggaggcttaaagtgttgtttgcaatctctacacgcgtgtctaactagtggaggttcgtcagctgctctagtttgaatcatcatcggcgtagtattcctacttttacagttaggacacggtgtattgtatttctcgtcgagaacgttaaaataatcgttgtaactcacatcctttattttatctatattgtattctactcctttcttaatgcattttataccgaataagagatagcgaaggaattctttttcggtgccgctagtacccttaatcatatcacatagtgttttatattccaaatttgtggcaatagacggtttatttctatacgatagtttgtttctggaatcctttgagtattctataccaatattattctttgattcgaatttagtttcttcgatattagattttgtattacctatattcttgatgtagtactttgatgatttttccatggcccattctattaagtcttccaagttggcatcatccacatattgtgatagtaattctcggatatcagtagcggctaccgccattgatgtttgttcattggatgagtaactactaatgtatacattttccatttataacacttatgtattaactttgttcatttatattttttcattattatgttgatattaacaaaagtgaatatatatatgttaataattgtattgtggttatacggctacaattttataatgagtgaaagtcagtgtccgatgatcaatgacgatagctttactctgaaaagaaagtatcaaatcgatagtgcggagtcaacaataaaaatggataagaagaggataaagtttcagaatagagccaaaatggtaaaagaaataaatcagacaataagagcagcacaaactcattacgagacattgaaactaggatacataaaatttaagagaatgattatgactactactctagaagatatagcaccatctattccaaataatcagaaaacttataaactattctcggacatttcagccatcggcaaagcatcacagaatccgagtaagatggtatatgctctgctgctttacatgtttcccaatttgtttggagatgatcatagattcattcgttatagaatgcatccaatgagtaaaatcaaacacaagatcttctctcctttcaaacttaatcttattagaatattagtggaagaaagattctataataatgaatgcagatctaataaatggagaataattggaacacaagttgataaaatgttgatagctgaatctgataaatatacaatagatgcaaggtataacctaaaacccatgtatagaatcaagggagaatctgaagaagataccctctttatcaaacagatggtagaacaatgtgtgacatcccaggaattggtggaaaaagtgttgaagatactgtttagagatttgttcaagagtggagaatacaaagcgtacagatacgatgatgatgtagaaaatggatttattggattggatacactaaaattaaacattgttcatgatatagttgaaccatgtatgcctgttcgtaggccagtggctaagatactgtgtaaagaaatggtaaataaatactttgagaatccgctacatattattggtaaaaatcttcaagagtgcattgactttgttagtgaataggcatttcatctttctccaatactaattcaaattgttaaattaataatggatagtataaatagttattagttataagatagtaaaaataattattagaataagagtgtagtatcatagataactctcttctataaaaatggattttattcgtagaaagtatcttatatacacagtagaaaataatatagattttttaaaggatgatacattaagtaaagtaaacaattttaccctcaatcatgtactagctctcaagtatctagttagcaattttcctcaacacgttattactaaggatgtattagctaataccaatttttttgttttcatacatatggtacgatgttgtaaagtgtacgaagcggttttacgacacgcatttgatgcacccacgttgtacgttaaagcattgactaagaattatttatcgtttagtaacgcaatacaatcgtacaaggaaaccgtgcataaactaacacaagatgaaaaatttttagaggttgccgaatacatggacgaattaggagaacttataggcgtaaattatgacttagttcttaatccattatttcacggaggggaacccatcaaagatatggaaatcatttttttaaaactgtttaagaaaacagacttcaaagttgttaaaaaattaagtgttataagattacttatttgggcatacctaagcaagaaagatacaggcatagagtttgcggataatgatagacaaaatatatacactctatttcaacaaactggtagaatcgtccatagcaatctaacagaaacgtttagagattatatctttcccggagataagactagctattgggtgtggttaaacgaaagtatagctaatgatgcggatatcgttcttaatagacacgccattaccatgtatgataaaattcttagttatatatactctgagataaaacaaggacgcgttaataaaaacatgcttaagttagtttatatctttgagcctgaaaaagatatcagagaacttctgctagaaatcatatatgatattcctggagatatcctatctattattgatgcaaaaaacgacgattggaaaaaatattttattagtttttataaagctaattttattaacggtaatacatttattagtgatagaacgtttaacgaggacttattcagagttgttgttcaaatagatcccgaatatttcgataatgaacgaattatgtctttattctctacgagtgctgcggacattaaacgatttgatgagttagatattaataacagttatatatctaatataatttatgaggtgaacgatatcacattagatacaatggatgatatgaagaagtgtcaaatctttaacgaggatacgtcgtattatgttaaggaatacaatacatacctgtttttgcacgagtcggatcccatggtcatagagaacggaatactaaagaaactgtcatctataaaatccaagagtagacggctgaacttgtttagcaaaaacattttaaaatattatttagacggacaattggctcgtctaggtcttgtgttagatgattataaaggagacttgttagttaaaatgataaaccatcttaagtctgtggaggatgtatccgcattcgttcgattttctacagataaaaaccctagtattcttccatcgctaatcaaaactattttagctagttataatatttccatcatcgtcttatttcaaaggtttttgagagataatctatatcatgtagaagaattcttggataaaagcatccatctaaccaagacggataagaaatatatacttcaattgataagacacggtagatcatagaacagaccaaatatattattaataatttgtatatacatagatataattatcacacatttttgataaatgggaactgctgcaacaattcagactcccaccaaattaatgaataaagaaaatgcagaaatgattttggaaaaaattgttgatcatatagttatgtatattagtgacgaatcaagtgattcagaaaataatcctgaatatattgattttcgtaacagatacgaagactatagatctctcattataaaaagtgatcacgagtttgtaaagctatgtaaaaatcatgcggagaaaagttctccagaaacgcaacaaatgattatcaaacacatatacgaacaatatcttattccagtatctgaagtactattaaaacctataatgtccatgggtgacataattacatataacggatgtaaagacaatgaatggatgctagaacaactctctaccctaaactttaacaatctccgcacatggaactcatgtagcataggcaatgtaacgcgtctgttttatacattttttagttatctgatgaaagataaactaaatatataagtataatcccattctaatactttaacctgatgtattagcatcttattagaatattaacctaactaaaagacataacataaaaactcattacatagttgataaaaagcggtaggatataaatattatggctgccaccgttccgcgttttgacgacgtgtacaaaaatgcacaaagaagaattctagatcaagaaacattttttagtagaggtctaagtagaccgttaatgaaaaacacatatctatttgataattacgcgtatggatggataccagaaactgcaatttggagtagtagatacgcaaacctagatgctagtgactattatcccatttcgttgggattacttaaaaagttcgagtttctcatgtctctatataaaggtcctattcccgtatatgaagaaaaagtaaatactgaattcatagccaatggatcgttctctggtagatacgtatcatatcttcgaaagttttctgcccttccaacaaacgagtttattagttttttgttactgacttccattccaatctataatatcttgttctggtttaaaaacacacagtttgatattactaaacacacattattcagatacgtctatacagataatgccaaacacctggcgttggctaggtatatgcatcaaacaggagactataagcctttgtttagtcgtctcaaagagaattatatatttaccggtcccgttccaataagtatcaaagatatagatcaccctaatcttagtagagcaagaagtccatccgattatgagacattagctaatattagtactatattgtactttaccaagtatgatccggtattaatgtttttattgttttacgtacctgggtattcaattactacaaaaattactccagccgtagaatatctaatggataaactgaatctaacaaagagcgacgtacaactgttgtaaattattttatgcttcgtaaaatgtaggttttgaaccaaacattctttcaaagaatgagatgcataaaactttattatccaatagattgactatttcggacgtcaatcgtttaaagtaaacttcgtaaaatattctttgatcactgccgagtttaaaacttctatcgataattgtctcatatgttttaatatttacaagttttttggtccatggtacattagccggacaaatatatgcaaaataatatcgttctccaagttctatagtttctggattatttttattatattcagtaactaaatacatattagggttatctgcggatttataatttgagtgatgcattctactcaacataaataattctagaggagacgatctactatcaaattcggatcgtaaatctgtttctaaagaacggagaatatctatacatacctgattagaattcatccgtccttcagacaacatctcagacagtctggttttgtacatcttaatcatattcttatgaaacttggaaacatctcttctagtttcactagtacctttattaattctctcaggtacagattttgaattcgacgatgctgagtatttcatcgttgtatatttcttcttcgattgcataatcagattcttatataccgcctcaaactctattttaaaattattaaacaatactctattattaatcagtcgttctaactctttcgctatttctatagacttatctacatcttgactgtctatctctgtaaacacggagtcggtatctccatacacgctacgaaaacgaaatctgtaatctataggcaacgatgttttcacaatcggattaatatctctatcgtccatataaaatggattacttaatggattggcaaaccgtaacataccgttagataactctgctccatttagtaccgattctagatacaagatcattctacgtcctatggatgtgcaactcttagccgaagcgtatgagtatagagcactatttctaaatcccatcagaccatatactgagttggctactatcttgtacgtatattgcatggaatcatagatggccttttcagttgaactggtagcctgttttagcatctttttatatctggctctctctgccaaaaatgttcttaatagtctaggaatggttccttctatcgatctatcgaaaattgctatttcagagatgaggttcggtagtctaggttcacaatgaaccgtaatatatctaggaggtggatatttctgaagcaatagctgattatttatttcttcttccaatctattggtactaacaacgacaccgactaatgtttccggagatagatttccaaagatacacacattaggatacagactgttataatcaaagattaatacattattactaaacattttttgttttggagcaaataccttaccgccttcataaggaaacttttgttttgtttctgatctaactaagatagttttagtttccaacaatagctttaacagtggacccttgatgactgtactcgctctatattcgaataccatggattgaggaagcacatatgttgacgcacccgcgtctgtttttgtttctactccataatactcccacaaatactgacacaaacaagcatcatgaatacagtatctagccatatctaaagctatgtttagattataatccttatacatctgagctaaatcaacgtcatcctttccgaaagataatttatatgtatcattaggtaaagtaggacataatagtacgactttaaatccattttcccaaatatctttacgaattactttacatataatatcctcatcaacagtcacataattacctgtggttaaaacctttgcaaatgcagcggctttgcctttcgcgtctgtagtatcgtcaccgatgaacgtcatttctctaactcctctatttaatactttacccatgcaactgaacgcgttcttggatatagaatccaatttgtacgaatccaatttttcaaatttttgaatgaatgaatatagatcgaaaaatatagttccattattgttattaacgtgaaacgtagtattggccatgccgcctactcccttatgactagactgatttctctcataaatacagagatgtacagcttcctttttgtccggagatctaaagataattttctctcctgttaataactctagacgattagtaatatatctcagatcaaagttatgtccgttaaaggtaacgacgtagtcgaacgttagttccaacaattgtttagctattcgtaacaaaactatttcagaacatagaactagttctcgttcgtaatccatttccattagtgactgtatcctcaaacatcctctatcgacggcttcttgtatttcctgttccgttaacatctcttcattaatgagcgtaaacaataatcgtttaccacttaaatcgatataacagtaacttgtatgcgagattgggttaataaatacagaaggaaacttcttatcgaagtgacactctatatctagaaataagtacgatcttgggatatcgaatctaggtatttttttagcgaaacagttacgtggatcgtcacaatgataacatccattgttaatctttgtcaaatattgctcgtccaacgagtaacatccgtctggagatatcccgttagaaatataaaaccaactaatattgagaaattcatccatggtggcattttgtatgctgcgtttctttggctcttctatcaaccacatatctgcgacggagcattttctatctttaatatctagattataacttattgtctcgtcaatgtctatagttctcatctttcccaacggcctcgcattaaatggaggaggagacaatgactgatatatttcgtccgtcactacgtaataaaagtaatgaggaaatcgtataaatacggtctcgccatttcgacatctggatttcagatataaaaatctgttttcaccgtgactttcaaaccaattaatgcaccgaacatccatttatagaatttagaaatatattttcatttaaatgaatcccaaacattggggaagagccgtatggaccattatttttatagtactttcgcaagcgggtttagacggcaacatagaagcgtgtaaacgaaaactatatactatagttagcactcttccatgtcctgcatgtagacggcacgcgactatcgctatagaggacaataatgtcatgtctagcgatgatctgaattatatttattattttttcatcagattatttaacaatttggcatctgatcccaaatacgcgatcgatgtgacaaaggttaaccctttataaacttaacccattataaaacttatgattagtcacaactgaaataaccgcgtgattattttttggtataattctacacggcatggtttctgtgactatgaattcaacccccgttacattagtgaaatctttaacaaacagcaagggttcgtcaaagacataaaactcattgtttacaatcgaaatagaccccctatcacacttaaaataaaaaatatccttatcctttaccaccaaataaaattctgattggtcaatgtgaatgtattcacttaacagttccacaaatttatttattaactccgaggcacatacatcgtcggtattttttatggcaaactttactcttccagcatccgtttctaaaaaaatattaacgagttccatttatatcatccaatattattgaaatgacgttgatggacagatgatacaaataagaaggtacggtacctttgtccaccatctcctccaattcatgctctattttgtcattaactttaatgtatgaaaacagtacgccacatgcttccatgacagtgtgtaacactttggatacaaaatgtttgacattagtataattgtccaagactgtcaatctataatagatagtagctataatatattctatgatggtattgaagaagatgacaaccttggcatattgatcatttaacacagacatggtatcaacagatagcttgaatgaaagagaatcagtaattggaataagcgtcttctcgatagagtgtccgtataccaacatgtctgatattttgatgtattccattaaattatttagttttttctttttattctcgttaaacagcatttctgtcaacggaccccaacatcgttgaccgattaagttttgattgatttttccgtgtaaggcgtatctagtcagatcgtatagcctatccaataatccatcgtctgtgtgtagatcacatcgtacactttttaattctctatagaagagcgacagacatctggagcaattacagacagcaatttctttattctctacagatgtaagatacttgaagacattcctatgatgatgcagaattttggataacacggtattgatggtatctgttaccataattcctttgatggctgatagtgtcagagcacaagatttccaatctttgacaatttttagcaccattatctttgttttgatatctatatcagacagcatggtgcgtctgacaacacagggattaagacggaaagatgaaatgattctctcaacatcttcaatagataccttgctattttttctggcattatctatatgtgcgagaatatcctctagagaatcagtatcctttttgatgatagtggatctcaatgacatgggacgtttaaaccttcttattctatcaccagattgcatggtgatttgtcttctttcttttatcataatgtaatctctaaattcatcggcaaattgtctatatctaaaatcataatatgagatgtttacctctacaaatatctgttcgtccaatgttagagtatttacatcagttttgtattccaaattaaacatggcaacggatttaattttatattcctctattaagtcctcgtcgataataacagaatgtagataatcatttaatccgtcgtacatggttggaagatgcttgttgacaaaatctttaattgtcttgatgaaggtgggactatatctaacatcttgattaataaaatttataacattgtccataggatactttgtaactagttttatacacatctcttcatcggtaagtttagacagaatatcgtgaacaggtggtatattatattcatcagatatacgaagaacaatgtccaaatctatattgtttaatatattatatagatgtagcgtagctcctacaggaatatctttaactaagtcaatgatttcatcaaccgttagatctattttaaagttaatcatataggcattgatttttaaaaggtatgtagccttgactacattctcattaattaaccattccaagtcattgtgtgtaagaagattatattctatcataagcttgactacatttggtcccgataccattaaagaattcttatgatataaggaaacagattttaggtactcatctactctacaagaattttggagagccttaacgatatcagtgacgtttattatttcaggaggaaagaatctaacattgagaatatcggaattaatagcttccagatacagtgattttggcaatagtccgtgtaatccataatccagtaacacgagctggtgcttgctagacaccttttcaatgtttaatttttttgaaataagctttgataaagccttcctcgcaaattccggatacatgaacatgtcggcgacatgattaagtattgttttttcattatttttatattttctcaacaagttctcaataccccaatagatgatagaatatcacccaatgcgtccatgttgtctatttccaacaggtcgctatatccaccaatagaagtttttccaaaaaagattctaggaacagttctaccaccagtaatttgttcaaaataatcccgcaattcattttcgggtttaaattctttaatatcgacaatttcatacgctcctcttttgaaactaaacttatttagaatatccagtgcatttctacaaaaaggacatgtatacttgacaaaaattgtcactttgttattggccaacctttgttgtacaaattcctcggccattttaatatttaagtgatataaaactatctcgacttatttaactctttagtcgagatatatggacgcagatagctatatgatagccaactacagaaggcaaacgctataaaaaacataattacgacgagcatatttataaatatttttattcagcattacttgatatagtaatattaggcacagtcaaacattcaaccactctcgatacattaactctctcattttctttaacaaattctgcaatatcttcgtaaaaagattcttgaaactttttagaatatctatcgactctagatgaaatagcgttcgtcaacatactatgttttgtatacataaaggcgcccattttaacagtttctagtgacaaaatgctagcgatcctaggatcctttagaatcacatagattgacgattcgtctctcttagtaactctagtaaaataatcatacaatctagtacgcgaaataatattatccttgacttgaggagatctaaacaatctagttttgagaacatcgataagttcatcgggaatgacatacatactatctttaatagaactcttttcatccagttgaatggattcgtccttaaccaactgattaatgagatcttctattttatcattttccagatgatatgtatgtccattaaagttaaattgtgtagcgcttctttttagtctagcagccaatactttaacatcactaatatcgatatacaaaggagatgatttatctatggcattaagaattcgtttttcgacatccgtcaaaaccaattcctttttgcctgtatcatccagttttccatcctttgtaaagaaattattttctactagactattaataagactgataaggattcctccataattgcacaatccaaactttttaacaaaactagactttacgagatctacaggaatgcgtacttcaggttttttagcttgtgattttttcttttgcggacattttctagtaaccaactcatctaccatttcattgattttagcagtgaaataagctttcaatgcacgggcactgatactattgaaaacgagttgatcttcaaattccgccatttaagttcaccaaacaacttttaaatacaaatatatcaatagtagtagaataagaactataaaaaaaataataattaaccaaccccaacaaccggtattattagttgatgtggtagttttctcatcacttagaacagatttaacaatttctataaagtctgtcaaatcatcttccggagaccccataaatacaccaaatatagcggcgtacaacttatccatttatacattgaatattggcttttctttatcgctatcttcatcatattcatcatcaatatcaacaagtcccagattacgagccagatcttcttctacattttcagtcattgatacacgttcactatctccagagagtccgataacgttagccaccacttctctatcaatgattagtttcttgagcgcgaaagtaatttttgtttccgttccggatctatagaagacgataggtgtgataattgccttggccaattgtctttctcttttactgagtgattctagttcaccttctatagatctgagaatggatgattctccagtcgaaacatattctaccatggatccgtttaatttgttgatgaagatggattcatccttaaatgttttctctgtaatagtttccaccgaaagactatgcaaagaatttggaatgcgttccttgtgcttaatgtttccatagacggcttctagaagttgatacaacataggactagccgcggtaacttttatttttagaaagtatccatcgcttctatcttgtttagatttatttttataaagtttagtctctccttccaacataataaaagtggaagtcatttgactagataaactatcagtaagttttatagagatagacgaacaattagcgtattgagaagcatttagtgtaacgtattcgatacattttgcattagatttactaatcgattttgcatactctataacacccgcacaagtctgtagagaatcgctagatgcagtaggtcttggtgaagtttcaactctcttcttgattaccttactcatgattaaacctaaataattgtactttgtaatataatgatatatattttcactttatctcatttgagaataaaaatgtttttgtttaaccactgcatgatgtacagatttcggaatcgcaaaccaccagtggttttattttatccttgtccaatgtgaattgaatgggagcggatgcgggtttcgtacgtagatagtacattcccgtttttagaccgagactccatccgtaaaaatgcatactcgttagtttggaataactcggatctgctatatggatattcatagattgactttgatcgatgaaggctcccctgtctgcagccatttttatgatcgtcttttgtggaatttcccaaatagttttataaactcgcttaatatcttctggaaggtttgtattctgaatggatccaccatctgccataatcctattcttgatctcatcattccataattttctctcggttaaaactctaaggagatgcggattaactacttgaaattctccagacaatactctccgagtgtaaatattactggtatacggttccaccgactcattatttcccaaaatttgagcagttgatgcagtcggcataggtgccaccaataaactatttctaagaccgtatgttctgattttatcttttagaggttcccaattccaaagatccgacggtacaacattccaaagatcatattgtagaataccgttactggcgtacgatcctacatatgtatcgtatggtccttccttctcagctagttcacaactcgcctctaatgcaccgtaataaatggtttcgaagatcttcttatttagatcttgtgcttccaggctatcaaatggataatttaagagaataaacgcgtccgctaatccttgaacaccaataccgataggtctatgtctcttattagagatttcagcttctggaataggataataattaatatctataattttattgagatttctgacaattactttgaccacatccttcagtttgagaaaatcaaatcgcccatctattacaaacatgttcaaggcaacagatgccagattacaaacggctacctcattagcatccgcatattgtattatctcagtgcaaagattactacacttgatagttcctaaattttgttgattactctttttgttacacgcatccttataaagaatgaatggagtaccagtttcaatctgagattctataatcgctttccagacgactcgagcctttattatagatttgtatctcctttctctttcgtatagtgtatacaatcgttcgaactcgtctccccaaacattgtccaatccaggacattcatccggacacatcaacgaccactctccgtcatccttcactcgtttcataaagagatcaggaatccaaagagctataaatagatctctggttctatgttcctcgtttcctgtattctttttaagatcgaggaacgccataatatcagaatgccacggttccaagtatatggccataactccaggccgtttgtttcctccctgatctatgtatctagcggtgttattataaactctcaacattggaataataccgtttgatataccattggtaccggagatatagcttccactggcacgaatattactaattgatagacctattccccctgccattttagagattaatgcgcatcgttttaacgtgtcatagataccctctatgctatcatcgatcatgttaagtagaaaacagctagacatttggtgacgactagttcccgcattaaataaggtaggagaagcgtgcgtaaaccatttttcagaaagtagattgtacgtctcaatagctgagtctatatcccattgatgaattcctactgcgacacgcattaacatgtgctgaggtctttcaacgatcttgttgtttattttcaacaagtaggatttttccaaagttttaaaaccaaaatagttgtatgaaaagtctcgttcgtaaataataaccgagttgagtttatccttatatttgttaactatatccatggtgatacttgaaataatcggagaatgtttcccatttttaggattaacatagttgaataaatcctccatcacttcactaaatagtttttttgtttccttgtgtagatttgatacggctattctggcggctagaatggcataatccggatgttgtgtagtacaagtggctgctatttcggctgccagagtgtccaattctaccgttgttactccattatatattccttgaataaccttcatagctattttaataggatctatatgatccgtgtttaagccataacataattttctaatacgagacgtgattttatcaaacatgacattttccttgtatccatttcgtttaatgacaaacatttttgttggtgtaataaaaaaattatttaacttttcattaatagggatttgacgtatgtagcgtacaaaatgattgttcctggtatatagataaagagtcctatatatttgaaaatcgttacggctcgattaaactttaatgattgcatagtgaatatatcattaggatttaactccttgactatcatggcggcgccagaaattaccatcaaaagcattaatacagttataccgatcgcagttagaacggttatagcatccaccatttatatctaaaaattagatcaaagaatatgtgacaaagtcctagttgtatactgagaattgacgaaacaatgtttcttacatatttttttcttattagtaaccgacttaatagtaggaactggaaaactagacttgattattctataagtatagatacccttccaaataatattctctttgataaaagttccagaaaatgtagaattttttaaaaagttatcttttgctattaccaagattgtgtttagacgcttattattaatatgagtgatgaaatccacaccgcctctagatatcgcctttatttccacattagatggtaaatccaatagtgaaactatctttttaggaatgtatggactcgcgtttagaggagtaaacgtcttaggcgtcggaaaggatgattcatcaaacgaataaacaatttcacaaatggatgttaatgtattagtaggaaattttttgacgctattggaattgaagattctaatggatgatgttctacctatttcatccgataacatgttaatttccgacaccaacggttttaatatttcgatgatatacggtagtctctctttcggacttatatagcttattccacaatacgagtcattatatactccaaaaaacaaaataactagtataaaatctgtatcgaatgggaaaaacgaaattatcgacataggtatagaatccggaacattgaacgtattaatacttaattctttttctgtggtaagtaccgataggttattgacattgtatggttttaaatattctataacttgagacttgatagatattagtgatgaattgaaaattatttttatcaccacgtgtgtttcaggatcatcgtcgacgcccgtcaaccaaccgaacggagtaaaataaatatcattaatatatgctctagatattagtatttttatcaatcctttgattatcatcttctcgtaggcgaatgattccatgatcaagagtgatttaagaacatcctccggagtattaatgggcttagtaaacagtccatcgttgcaataataaaagttatccaagttaaaggatattatgcattcgtttaaagatatcacctcatctgacggagacaattttttggtaggttttagagactttgaagctacttgtttaacaaagttattcatcgtcgtctactattctatttaattttgtagttaatttatcacatatcacattaattgactttttggtccacttttccatacgtttatattcttttaatcctgcgttatccgtttccgttatatccagggatagatcttgcaagttaaatagaatgctcttaaataatgtcattttcttatccgctaaaaatttaaagaatgtataaacctttttcagagatttgaaactcttaggtggtgtcctagtacacaatatcataaacaaactaataaacattccacattcagattccaacagctgattaacttccacattaatacagcctattttcgctccaaatgtacattcgaaaaatctgaataaaacatcgatgtcacaatttgtattatccaatacagaatgtttgtgattcgtgttaaaaccatcggagaaggaatagaaataaaaattattatagtggtggaattcagttggaatattgcctccggagtcataaaaggatactaaacattgttttttatcataaattacacatttccaatgagacaaataacaaaatccaaacattacaaatctagaggtagaacttttaattttgtctttaagtatatacgataagatatgtttattcataaacgcgtcaaatttttcatgaatcgctaaggagtttaagaatctcatgtcaaattgtcctatataatccacttcggatccataagcaaactgagagactaagttcttaatacttcgattgctcatccaggctcctctctcaggctctattttcatcttgacgacctttggattttcaccagtatgtattcctttacgtgataaatcatcgattttcaaatccatttgtgagaagtctatcgccttagatactttttcccgtagtcgaggtttaaaaaaatacgctaacggtatactagtaggtaactcaaagacatcatatatagaatggtaacgcgtctttaactcgtcggttaactctttcttttgatcgagttcgtcgctactattgggtctgctcaggtgccccgactctactagttccaacatcataccgataggaatacaagacactttgccggcggttgtagatttatcatatttttccactacatatccgttacaatttgttaaaaatttagatacatctatattgctacataatccagctagtgaatatatatgacataataaattggtaaatcctagttctggtattttactaattactaaatctgtatatctttccatttatcatggaaaagaatttaccagatatcttcttttttccaaactgcgttaatgtattctcttacaaatattcacaagatgaattcagtaatatgagtaaaacggaacgtgatagtttctcattggccgtgtttccagttataaaacatagatggcataacgcacacgttgtaaaacataaaggaatatacaaagttagtacagaagcacgtggaaaaaaagtatctcctccatcactaggaaaacccgcacacataaacctaaccgcgaagcaatatatatacagtgaacacacaataagctttgaatgttatagttttctaaaatgtataacaaatacagaaatcaattcgttcgatgagtatatattaagaggactattagaagctggtaatagtttacagatattttccaattccgtaggtaaacgaacagatactataggtgtactagggaataagtatccatttagcaaaattccattggcctcattaactcctaaagcacaacgagagatattttcagcgtggatttctcatagacctgtagttttaactggaggaactggagtgggtaagacgtcacaggtacccaagttattgctttggtttaattatttatttggtggattctctactctagataaaatcactgactttcacgaaagaccagtcattctatctcttcctaggatagctttagttagattgcatagcaataccattttaaaatcattgggatttaaggtactagatggatctcctatttctttacggtacggatctataccggaagaattaataaacaaacaaccaaaaaaatatggaattgtattttctacccataagttatctctaacaaaactatttagttatggcactcttattatagacgaagttcatgagcatgatcaaataggagatattattatagcagtagcgagaaagcatcatacgaaaatagattctatgtttttaatgactgccacgttagaggatgacagggaacggctaaaagtatttttacctaatcccgcatttatacatattcctggagatacactgtttaaaattagcgaggtatttattcataataagataaatccatcttccagaatggcatacatagaagaagaaaagagaaatttagttactgctatacagatgtatactcctcctgatggatcatccggtatagtctttgtggcatccgttgcacagtgtcacgaatataaatcatatttagaaaaaagattaccgtatgatatgtatattattcatggtaaggtcttagatatagacgaaatattagaaaaagtgtattcatcacctaatgtatcgataattatttctactccttatttggaatccagcgttactatacgcaatgttacacacatttatgatatgggtagagtttttgtccccgctccttttggaggatcgcaacaatttatttctaaatctatgagagatcaacgaaaaggaagagtaggaagagttaatcctggtacatacgtctatttctatgatctgtcttatatgaagtctatacagcgaatagattcagaatttctacataattatatattgtacgctaataagtttaatctaacactccccgaagatttgtttataatccctacaaatttggatattctatggcgtacaaaggaatatatagactcgttcgatattagtacagaaacatggaataaattattatccaattattatatgaagatgatagagtatgctaaactttatgtactaagtcctattctcgctgaggagttggataactttgagaggacgggagaattaactagtattgtacgagaagccattttatctctaaatttacaaattaagattttaaattttaaacataaagatgatgatacgtatatacacttttgtaaaatattattcggtgtctataacggaacaaacgctactatatattatcatagacctctaacgggatatatgaatatgatttcagatactatatttgttcctgtagataataactaaaaatcaaactctaatgaccacatctttttttagagatgaaaaattttccacatctccttttgtagacacgactaaacattttgcagaaaaaagtttattagtgtttagataatcgtatacttcatcagtgtagatagtaaatgtgaacagataaaaggtattcttgctcaatagattggtaaattccatagaatatattaatcctttcttcttgagatcccacatcatttcaaccagagacgttttatccaatgatttacctcgtactataccacatacaaaactagattttgcagtgacgtcgtacctggtattcctaccaaacaaaattttacttttagttcttttagaaaattctaaggtagaatctctatttgccaatatgtcatctatggaattaccactagcaaaaaatgatagaaatatatattgatacatcgcagctggttttgatctactatactttaaaaacgaatcagattccataattgcctgtatatcatcagctgaaaaactatgttttacacgtattccttcggcatttctttttaatgatatatcttgtttagacaatgataaagttatcatgtccatgagagacgcgtctccgtatcgtataaatatttcattagatgttagacgcttcattaggggtatacttctataaggtttcttaatcagtccatcattggttgcgtcaagaactactatcggatgttgttgggtatctctagtgttacacatggccttactaaagtttgggtaaataactatgatatctctattaattatagatgcatatatttcattcgtcaaggatattagtatcgacttgctatcgtcattaatacgtgtaatgtaatcatataaatcatgcgatagccaaggaaaatttaaatagatgttcatcatataatcgtcgctataattcatattaatacgttgacattgactaatttgtaatatagcctcgccacgaagaaagctctcgtattcagtttcatcgataaaggataccgttaaatataactggttgccgatagtctcatagtctattaagtggtaagtttcgtacaaatacagaatccctaaaatattatctaatgttggattaatctttaccataactgtataaaatggagacggagtcataactattttaccgtttgtacttactggaatagatgaaggaataatctccggacatgctggtaaagacccaaatgtctgtttgaagaaatccaatgttccaggtcctaatctcttaacaaaaattacgatattcgatcccgatatcctttgcattctatttaccagcatatcacgaactatattaagattatctatcatgtctattctcccaccgttatataaatcgcctccgctaagaaacgttagtatatccatacaatggaatacttcatttctaaaatagtattcgttttctaattctttaatgtgaaatcgtatactagaaagggaaaaattatctttgagttttccgttagaaaagaaccacgaaactaatgttctgattgcgtccgattccgttgctgaattaatggatttacaccaaaaactcatataacttctagatgtagaagcattcgctaaaaaattagtagaatcaaaggatataagtagatgttccaacaagtgagcaattcccaagatttcatctatatcattctcgaatccgaaattagaaattcccaagtagatatcctttttcatccgatcgttgatgaaaatacgaactttattcggtaagacaatcatttactaaggagtaaaataggaagtaatgttcgtatgtcgttatcatcgtataaattaaaggtgtgttttttaccattaagtgacattataattttaccaatattggaattataatataggtgtatttgcgcactcgcgacggttgatgcatcggtaaatatagctgtatctaatgttctagtcggtatttcatcatttcgctgtctaataatagcgttttctctatctgtttccattacagctgcctgaagtttattggtcggataatatgtaaaataataagaaatacatacgaataacaaaaataaaataagatataataaagatgccatttagagatctaattttgtttaacttgtccaaattcctacttacagaagatgaggaatcgttggagatagtgtcttccttatgtagaggatttgaaatatcttataatgacttgataacttactttccagataggaaataccataaatatatttataaagtatttgaacatgtagatttatcggaggaattaagtatggaattccatgatacaactctgagagatttagtctatcttagattgtacaagtattccaagtgtatacggccgtgttataaattaggagataatctaaaaggcatagttgttataaaggacaggaatatttatattagggaagcaaatgatgacttgatagaatatctcctcaaggaatacactcctcagatttatacatattctaatgagcgcgtccccataactggttcaaaattaattctttgtggattttctcaagttacatttatggcgtatacaacgtcgcatataacaacaaataaaaaggtagatgttctcgtttccaaaaaatgtatagatgaactagtcgatccaataaattatcaaatacttcaaaatttatttgataaaggaagcggaacaataaacaaaatactcaggaagatattttattcggtaacaggtggccaaactccataggtagctttttctatttcggattttagaatttccaaattcaccagcgatttatcggttttggtgaaatccaaggatttattaatgtccacaaatgccatttgttttgtctgtggattgtatttgaaaatggaaacgatgtagttagatagatgcgctgcgaagtttcctattagggttccgcgcttcacgtcacccagcatacttgaatcaccatcctttaaaaaaaatgataagatatcaacatggagtatatcatactcgaattttaattcttctactgactcactgacattttcacaaatactacaatacggtttaccgaaaataatcagtacgttcttcatttatgggtatcaaaaacttaaaatcgttactgctggaaaataaatcactgacgatattagatgataatttatacaaagtatacaatggaatatttgtggatacaatgagtatttatatagccgtcgccaattgtgtcagaaacttagaagagttaactacggtattcataaaatacgtaaacggatgggtaaaaaagggagggcatgtaaccctttttatcgatagaggaagtataaaaattaaacaagacgttagagacaagagacgtaaatattctaaattaaccaaggacagaaaaatgttagaattagaaaagtgtacatccgaaatacaaaatgttaccggatttatggaagaagaaataaaggcagaaatgcaattaaaaatcgataaactcacatttcaaatatatttatctgattctgataacataaaaatatcattgaatgagatactaacacatttcaacaataatgagaatgttacattattttattgtgatgaacgagacgcagaattcgttatgtgtctcgaggctaaaacacatttctctaccacaggagaatggccgttgataataagtaccgatcaggatactatgctatttgcatctgctgataatcatcctaagatgataaaaaacttaactcaactgtttaaatttgttccctcggcagaggataactatttagcaaaattaacggcgttagtgaatggatgtgatttctttcctggactctatggggcatctataacacccaccaacttaaacaaaatacaattgtttagtgattttacaatcgataatatagtcactagtttggcaattaaaaattattatagaaagactaactctaccgtagacgtgcgtaatattgttacgtttataaacgattacgctaatttagacgatgtctactcgtatattcctccttgtcaatgcactgttcaagaatttatattttccgcattagatgaaaaatggaatgaatttaaatcatcttatttagaaagcgtgccgttaccctgccaattaatgtacgcgttagaaccacgcaaggagattgatgtttcagaagttaaaactttatcatcttatatagatttcgaaaatactaaatcagatatcgatgttataaaatctatatcctcgatcttcggatattctaacgaaaactgtaacacgatagtattcggcatctataaggataatttactactgagtataaataattcattttactttaacgatagtctgttaataaccaatactaaaagtgataatataataaatataggttactagattaaaaatggtgttccaactcgtgtgctctacatgcggtaaagatatttctcacgaacgatataaattgattatacgaaaaaaatcattaaaggatgtactcgtcagtgtaaagaacgaatgttgtaggttaaaattatctacacaaatagaacctcaacgtaacttaacagtgcaacctctattggatataaactaatatggatccggttaattttatcaagacatatgcgcctagaggttctattatttttattaattataccatgtcattaacaagtcatttgaatccatcgatagaaaaacatgtgggtatttattatggtacgttattatcggaacacttggtagttgaatctacctatagaaaaggagttcgaatagtcccattggatagtttttttgaaggatatcttagtgcaaaagtatacatgttagagaatattcaagttatgaaaatagcagctgatacgtcattaactttattgggtattccgtatggatttggtcatgatagaatgtattgttttaaattggtagctgactgttataaaaatgccggtattgatacatcgtctaaacgaatattgggcaaagatatttttctgagccaaaacttcacagacgataatagatggataaagatatatgattctaataatttaacattttggcaaattgattaccttaaagggtgagttaatatgcataactactcctccgttgttttttccctcgttctttttcttaacgttgtttgccatcactctcataatgtaaagatattctaaaatggtaaacttttgcatatcggacgcagaaattggtataaatgttgtaattgtattatttcccgtcaatggactagtcacagctccatcagttttatatcctttagagtatttctcactcgtgtctaacattctagagcattccatgatctgtttatcgttgatattggccggaaagatagattttttattttttattatattactattggcaattgtagatataacttctggtaaatatttttctaccttttcaatctcttctattttcaagccggctatatattctgctatattgttgctagtatcaataccttttctggctaagaagtcatatgtggtattcactatatcagttttaactggtagttccattagcctttccacttctgcagaataatcagaaattggttctttaccagaaaatccagctactataataggctcaccgatgatcattggcaaaatcctatattgtaccagattaatgagagcatatttcatttccaataattctgctagttcttgagacattgatttatttgatgaatctagttggttctctagatactctaccatttctgccgcatacaataacttgttagataaaatcagggttatcaaagtgtttagcgtggctagaatagtgggcttgcatgtattaaagaatgcggtagtatgagtaaaccgttttaacgaattatatagtctccagaaatctgtggcgttacatacatgagccgaatgacatcgaagattgtccaatatttttaatagctgctctttgtccattatttctatatttgactcgcaacaattgtagataccattaatcaccgattcctttttcgatgccggacaatagcacaattgtttagctttggactctatgtattcagaattaatagatatatctctcaatacagattgcactatacattttgaaactatgtcaaaaattgtagaacgacgctgttctgcagccatttaactttaaataatttacaaaaatttaaaatgagcatccgtataaaaatcgataaactgcgccaaattgtggcatatttttcagagttcagtgaagaagtgtctataaatgtagactcgacggatgagttaatgtatatttttgccgccttgggcggatctgtaaacatttgggcaattatacctctaagtgcatcagtgttttaccgaggagccgaaaatattgtgtttaatcttcctgtgtccaaggtaaaatcgtgtttgtgtagttttcacaatgatgccatcatagatatagaacctgatctggaaaataatctagtaaaactttctagttatcatgtagtaagtgtcgattgtaacaaggaactgatgcctattaggacagatactactatttgtctaagtatagatcaaaagaaatcttacgtgtttaattttcacaagtatgaagaaaaatgttgtggtagaaccgtcattcatctagaatggttgttgggctttatcaagtgtattagtcagcatcagcatctggctattatgtttaaagatgacaatattattatgaagactcctggtaatactgatgcgttttccagggaatattctatgactgaatgttctcaagaactacaaaagttttctttcaaaatagctatctcgtctctcaacaaactacgaggattcaaaaagagagtcaatgtttttgaaactagaatcgtaatggataatgacgataacattttaggaatgttgttttcggatagagttcaatcctttaagatcaacatctttatggcgtttttagattaatactttcaatgagataaatatgggtggcggagtaagtgttgagctccctaaacgggatccgcctccgggagtacccactgatgagatgttattaaacgtggataaaatgcatgacgtgatagctcccgctaagcttttagaatatgtgcatataggaccactagcaaaagataaagaggataaagtaaagaaaagatatccagagtttagattagtcaacacaggacccggtggtctttcggcattgttaagacaatcgtataatggaaccgcacccaattgctgtcgcacttttaatcgtactcattattggaagaaggatggaaagatatcagataagtatgaagagggtgcagtattagaatcgtgttggccagacgttcacgacactggaaaatgcgatgttgatttattcgactggtgtcagggggatacgttcgatagaaacatatgccatcagtggatcggttcagcctttaataggagtaatagaactgtagagggtcaacaatcgttaataaatctgtataataagatgcaaacattatgtagtaaagatgctagtgtaccaatatgcgaatcatttttgcattatttacgcgcacacaatacagaagatagcaaagagatgatcgattatattctaagacaacagtctgcggactttaaacagaaatatatgagatgtagttatcccactagagataagttagaagagtcattaaaatatgcggaacctcgagaatgttgggatccagagtgttcgaatgccaatgttaatttcttactaacacgtaattataataatttaggactttgcaatattgtacgatgtaataccagcgtgaacaacttacagatggataaaacttcctcattaagattgtcatgtggattaagcaatagtgatagattttctactgttcccgtcaatagagcaaaagtagttcaacataatattaaacactcgttcgacctaaaattgcatttgatcagtttattatctctcttggtaatatggatactaattgtagctatttaaatgggtgccgcggcaagcatacagacgacggtgaatacactcagcgaacgtatctcgtctaaattagaacaagaagcgaacgctagtgctcaaacaaaatgtgatatagaaatcggaaatttttatatccgacaaaaccatggatgtaacctcactgttaaaaatatgtgctctgcggacgcggatgctcagttggatgctgtgttatcagccgctacagaaacatatagtggattaacaccggaacaaaaagcatacgtgccagctatgtttactgctgcgttaaacattcagacgagtgtaaacactgttgttagagattttgaaaattatgtgaaacagacttgtaattctagcgcggtcgtcgataacaaattaaagatacaaaacgtaatcatagatgaatgttacggagccccaggatctccaacaaatttggaatttattaatacaggatctagcaaaggaaattgtgccattaaagcgttgatgcaattgacgactaaggccactactcaaatagcacctagacaagttgctggtacaggagttcagttttatatgattgttatcggtgttataatattggcagcgttgtttatgtactatgccaagcgtatgttgttcacatccaccaatgataaaatcaaacttattttagccaataaggaaaacgtccattggactacttacatggacacattctttagaacttctccgatggttattgctaccacggatatgcaaaactgaaaatatattgataatattttaatagattaacatggaagttatcgctgatcgtctagacgatatagtgaaacaaaatatagcggatgaaaaatttgtagattttgttatacacggtctagagcatcaatgtcctgctatacttcgaccattaattaggttgtttattgatatactattatttgttatagtaatttatatttttacggtacgtctagtaagtagaaattatcaaatgttgttggtggtgctagtcatcacattaactattttttattactttatactataatagtactagactgacttctaacaaacatctcacctgccataaataaatgcttgatattaaagtcttctatttctaacactattccatctgtggaaaataatactctgacattatcgctaattgacacatcggtgagtgatatgcctataaagtaataatcttctttgggcacatataccagtgtaccaggttctaacaacctatttactggtgctcctgtagcatactttttctttaccttgagaatatccatcgtttgcttggtcaatagcgatatgtgattttttatcaaccactcaaaaaagtaattggagtgttcatatcctctacgggctattgtctcatggccgtgtatgaaatttaagtaacacgactgtggtagatttgttctatagagccgattgccgcaaatagatagaactaccaatatgtctgtacaaatgttaaacattaattgattaacagaaaaaacaatgttcgttctgggaatagaaaccagatcaaaacaaaattcgttagaatatatgccacgtttatacatggaatataaaataactacagtttgaaaaataacagtatcatttaaacatttaacttgcggggttaatctcacaactttactgtttttgaactgttcaaaatatagcatcgatccgtgagaaatacgtttagccgcctttaatagaggaaatcccaccgcctttctggatctcaccaacgacgatagttctgaccagcaactcatttcttcatcatccacctgttttaacatataataggcaggagatagatatccgtcattgcaatattccttctcgtaggcacacaatctaatattgataaaatctccattctcttctctgcatttattatcttgtctcggtggctgattaggctgtggtcttggtttaggccttggtctatcgttgttgaatctattttggtcattaaatctttcatttcttcctggtatatttctatcacctcgtttggttggatttttgtctatattatcgtttgtaacatcggtacgggtattcatttatcacaaaaaaaacttctctaaatgagtctactgctagaaaacctcatcgaagaagataccatattttttgcaggaagtatatctgagtatgatgatttacaaatggttattgccggcgcaaaatccaaatttccaagatctatgctttctatttttaatatagtacctagaacgatgtcaaaatatgagttggagttgattcataacgaaaatatcacaggagcaatgtttaccacaatgtataatataagaaacaatttgggtctaggagatgataaactaactattgaagccattgaaaactatttcttggatcctaacaatgaagttatgcctcttattattaataatacggatatgactgccgtcattcctaaaaaaagtggtaggagaaagaataagaacatggttatcttccgtcaaggatcatcacctatcttgtgcattttcgaaactcgtaaaaagattaatatttataaagaaaatatggaatccgcgtcgactgagtatacacctatcggagacaacaaggctttgatatctaaatatgcgggaattaatgtcctgaatgtgtattctccttccacatccataagattgaatgccatttacggattcaccaataaaaataaactagagaaacttagtactaataaggaactagaatcgtatagttctagccctcttcaagaacccattaggttaaatgattttctgggactattggaatgtgttaaaaagaatattcctctaacagatattccgacaaaggattgattactataaatggagaatgttcctaatgtatactttaatcctgtgtttatagagcccacgtttaaacattctttattaagtgtttataaacacagattaatagttttatttgaagtattcgttgtattcattctaatatatgtattttttagatctgaattaaatatgttcttcatgcctaaacgaaaaatacccgatcctattgatagattacgacgtgctaatctagcgtgtgaagacgataaattaatgatctatggattaccatggatgacaactcaaacatctgcgttatcaataaatagtaaaccgatagtgtataaagattgtgcaaagcttttgcgatcaataaatggatcacaaccagtatctcttaacgatgttcttcgcagatgatgattcattttttaagtatttggctagtcaagatgatgaatcttcattatctgatatattgcaaatcactcaatatctagactttctgttattattattgatccaatcaaaaaataaattagaagctgtgggtcattgttatgaatctctttcagaggaatacagacaattgacaaaattcacagactttcaagattttaaaaaactgtttaacaaggtccctattgttacagatggaagggtcaaacttaataaaggatatttgttcgactttgtgattagtttgatgcgattcaaaaaagaatcctctctagctaccaccgcaatagatcctgttagatacatagatcctcgtcgcaatatcgcattttctaacgtgatggatatattaaagtcgaataaagtgaacaataattaattctttattgtcatcatgaacggcggacatattcagttgataatcggccccatgttttcaggtaaaagtacagaattaattagacgagttagacgttatcaaatagctcaatataaatgcgtgactataaaatattctaacgataatagatacggaacgggactatggacgcatgataagaataattttgaagcattggaagcaactaaactatgtgatgtcttggaatcaattacagatttctccgtgataggtatcgatgaaggacagttctttccagacattgttgaattagatcgataaaaattaattaattacccgggtaccaggcctagatctgtcgagatccggtggtggtgcaaatcaaagaactgctcctcagtggatgttgcctttacttctaggcctgtacggaagtgttacttctgctctaaaagctgctgcagggggggggggggggtgggggggccggttagggccgccatcccctcagagcgtcgggatatcgggtggcggctcgggacggaggacgcgctagtgttcttctgtgtggcagttcagaatgatggatcaagctagatcagcattctctaacttgtttggtggagaaccattgtcatatacccggttcagcctggctcggcaagtagatggcgataacagtcatgtggagatgaaacttgctgtagatgaagaagaaaatgctgacaataacacaaaggccaatgtcacaaaaccaaaaaggtgtagtggaagtatctgctatgggactattgctgtgatcgtctttttcttgattggatttatgattggctacttgggctattgtaaaggggtagaaccaaaaactgagtgtgagagactggcaggaaccgagtctccagtgagggaggagccaggagaggacttccctgcagcacgtcgcttatattgggatgacctgaagagaaagttgtcggagaaactggacagcacagacttcaccagcaccatcaagctgctgaatgaaaattcatatgtccctcgtgaggctggatctcaaaaagatgaaaatcttgcgttgtatgttgaaaatcaatttcgtgaatttaaactcagcaaagtctggcgtgatcaacattttgttaagattcaggtcaaagacagcgctcaaaactcggtgatcatagttgataagaacggtagacttgtttacctggtggagaatcctgggggttatgtggcgtatagtaaggctgcaacagttactggtaaactggtccatgctaattttggtactaaaaaagattttgaggatttatacactcctgtgaatggatctatagtgattgtcagagcagggaaaatcacctttgcagaaaaggttgcaaatgctgaaagcttaaatgcaattggtgtgttgatatacatggaccagactaaatttcccattgttaacgcagaactttcattctttggacatgctcatctggggacaggtgacccttacacacctggattcccttccttcaatcacactcagtttccaccatctcggtcatcaggattgcctaatatacctgtccagacaatctccagagctgctgcagaaaagctgtttgggaatatggaaggagactgtccctctgactggaaaacagactctacatgtaggatggtaacctcagaaagcaagaatgtgaagctcactgtgagcaatgtgctgaaagagataaaaattcttaacatctttggagttattaaaggctttgtagaaccagatcactatgttgtagttggggcccagagagatgcatggggccctggagctgcaaaatccggtgtaggcacagctctcctattgaaacttgcccagatgttctcagatatggtcttaaaagatgggtttcagcccagcagaagcattatctttgccagttggagtgctggagactttggatcggttggtgccactgaatggctagagggatacctttcgtccctgcatttaaaggctttcacttatattaatctggataaagcggttcttggtaccagcaacttcaaggtttctgccagcccactgttgtatacgcttattgagaaaacaatgcaaaatgtgaagcatccggttactgggcaatttctatatcaggacagcaactgggccagcaaagttgagaaactcactttagacaatgctgctttccctttccttgcatattctggaatcccagcagtttctttctgtttttgcgaggacacagattatccttatttgggtaccaccatggacacctataaggaactgattgagaggattcctgagttgaacaaagtggcacgagcagctgcagaggtcgctggtcagttcgtgattaaactaacccatgatgttgaattgaacctggactatgagaggtacaacagccaactgctttcatttgtgagggatctgaaccaatacagagcagacataaaggaaatgggcctgagtttacagtggctgtattctgctcgtggagacttcttccgtgctacttccagactaacaacagatttcgggaatgctgagaaaacagacagatttgtcatgaagaaactcaatgatcgtgtcatgagagtggagtatcacttcctctctccctacgtatctccaaaagagtctcctttccgacatgtcttctggggctccggctctcacacgctgccagctttactggagaacttgaaactgcgtaaacaaaataacggtgcttttaatgaaacgctgttcagaaaccagttggctctagctacttggactattcagggagctgcaaatgccctctctggtgacgtttgggacattgacaatgagttttaaatgtgatacccatagcttccatgagaacagcagggtagtctggtttctagacttgtgctgatcgtgctaaattttcagtagggctacaaaacctgatgttaaaattccatcccatcatcttggtactactagatgtctttaggcagcagcttttaatacagggtagataacctgtacttcaagttaaagtgaataaccacttaaaaaatgtccatgatggaatattcccctatctctagaattttaagtgctttgtaatgggaactgcctctttcctgttgttgttaatgaaaatgtcagaaaccagttatgtgaatgatctctctgaatcctaagggctggtctctgctgaaggttgtaagtggtcgcttactttgagtgatcctccaacttcatttgatgctaaataggagataccaggttgaaagaccttctccaaatgagatctaagcctttccataaggaatgtagctggtttcctcattcctgaaagaaacagttaactttcagaagagatgggcttgttttcttgccaatgaggtctgaaatggaggtccttctgctggataaaatgaggttcaactgttgattgcaggaataaggccttaatatgttaacctcagtgtcatttatgaaaagaggggaccagaagccaaagacttagtatattttcttttcctctgtcccttcccccataagcctccatttagttctttgttatttttgtttcttccaaagcacattgaaagagaaccagtttcaggtgtttagttgcagactcagtttgtcagactttaaagaataatatgctgccaaattttggccaaagtgttaatcttaggggagagctttctgtccttttggcactgagatatttattgtttatttatcagtgacagagttcactataaatggtgtttttttaatagaatataattatcggaagcagtgccttccataattatgacagttatactgtcggttttttttaaataaaagcagcatctgctaataaaacccaacagatactggaagttttgcatttatggtcaacacttaagggttttagaaaacagccgtcagccaaatgtaattgaataaagttgaagctaagatttagagatgaattaaatttaattaggggttgctaagaagcgagcactgaccagataagaatgctggttttcctaaatgcagtgaattgtgaccaagttataaatcaatgtcacttaaaggctgtggtagtactcctgcaaaattttatagctcagtttatccaaggtgtaactctaattcccattttgcaaaatttccagtacctttgtcacaatcctaacacattatcgggagcagtatcttccataatgtataaagaacaaggtagtttttacctaccacagtgtctgtatcggagacagtgatctccatatgttacactaagggtgtaagtaattatcgggaacagtgtttcccataattttcttcatgcaatgacatcttcaaagcttgaagatcgttagtatctaacatgtatcccaactcctataattccctatcttttagttttagttgcagaaacattttgtggtcattaagcattgggtgggtaaattcaaccactgtaaaatgaaattactacaaaatttgaaatttagcttgggtttttgttacctttatggtttctccaggtcctctacttaatgagatagtagcatacatttataatgtttgctattgacaagtcattttaactttatcacattatttgcatgttacctcctataaacttagtgcggacaagttttaatccagaattgaccttttgacttaaagcagagggactttgtatagaaggtttgggggctgtggggaaggagagtcccctgaaggtctgacacgtctgcctacccattcgtggtgatcaattaaatgtaggtatgaataagttcgaagctccgtgagtgaaccatcattataaacgtgatgatcagctgtttgtcatagggcagttggaaacggcctcctagggaaaagttcatagggtctcttcaggttcttagtgtcacttacctagatttacagcctcacttgaatgtgtcactactcacagtctctttaatcttcagttttatctttaatctcctcttttatcttggactgacatttagcgtagctaagtgaaaaggtcatagctgagattcctggttcgggtgttacgcacacgtacttaaatgaaagcatgtggcatgttcatcgtataacacaatatgaatacagggcatgcattttgcagcagtgagtctcttcagaaaacccttttctacagttagggttgagttacttcctatcaagccagtacgtgctaacaggctcaatattcctgaatgaaatatcagactagtgacaagctcctggtcttgagatgtcttctcgttaaggagatgggccttttggaggtaaaggataaaatgaatgagttctgtcatgattcactattctagaacttgcatgacctttactgtgttagctctttgaatgttcttgaaattttagactttctttgtaaacaaatgatatgtccttatcattgtataaaagctgttatgtgcaacagtgtggagattccttgtctgatttaataaaatacttaaacactgaaaaaaaaaaaaaaaaaaaaaaaaaaaaaaaaaaaaaaaaaaaaaaaaaaaaaaaaaaaaaaaaaaaaaaaaaaaaaaaaagtaccttctgaggcggaaagaaccagccggatctcgacttcgagcttatttatattccaaaaaaaaaaaataaaatttcaatttttaagctttcactaattccaaacccacccgctttttatagtaagtttttcacccataaataataaatacaataattaatttctcgtaaaagtagaaaatatattctaatttattgcacggtaaggaagtagatcataactcgagcatgggagatcccgtcgttttacaacgtcgtgactgggaaaaccctggcgttacccaacttaatcgccttgcagcacatccccctttcgccagctggcgtaatagcgaagaggcccgcaccgatcgcccttcccaacagttgcgcagcctgaatggcgaatggcgctttgcctggtttccggcaccagaagcggtgccggaaagctggctggagtgcgatcttcctgaggccgatactgtcgtcgtcccctcaaactggcagatgcacggttacgatgcgcccatctacaccaacgtgacctatcccattacggtcaatccgccgtttgttcccacggagaatccgacgggttgttactcgctcacatttaatgttgatgaaagctggctacaggaaggccagacgcgaattatttttgatggcgttaactcggcgtttcatctgtggtgcaacgggcgctgggtcggttacggccaggacagtcgtttgccgtctgaatttgacctgagcgcatttttacgcgccggagaaaaccgcctcgcggtgatggtgctgcgctggagtgacggcagttatctggaagatcaggatatgtggcggatgagcggcattttccgtgacgtctcgttgctgcataaaccgactacacaaatcagcgatttccatgttgccactcgctttaatgatgatttcagccgcgctgtactggaggctgaagttcagatgtgcggcgagttgcgtgactacctacgggtaacagtttctttatggcagggtgaaacgcaggtcgccagcggcaccgcgcctttcggcggtgaaattatcgatgagcgtggtggttatgccgatcgcgtcacactacgtctgaacgtcgaaaacccgaaactgtggagcgccgaaatcccgaatctctatcgtgcggtggttgaactgcacaccgccgacggcacgctgattgaagcagaagcctgcgatgtcggtttccgcgaggtgcggattgaaaatggtctgctgctgctgaacggcaagccgttgctgattcgaggcgttaaccgtcacgagcatcatcctctgcatggtcaggtcatggatgagcagacgatggtgcaggatatcctgctgatgaagcagaacaactttaacgccgtgcgctgttcgcattatccgaaccatccgctgtggtacacgctgtgcgaccgctacggcctgtatgtggtggatgaagccaatattgaaacccacggcatggtgccaatgaatcgtctgaccgatgatccgcgctggctaccggcgatgagcgaacgcgtaacgcgaatggtgcagcgcgatcgtaatcacccgagtgtgatcatctggtcgctggggaatgaatcaggccacggcgctaatcacgacgcgctgtatcgctggatcaaatctgtcgatccttcccgcccggtgcagtatgaaggcggcggagccgacaccacggccaccgatattatttgcccgatgtacgcgcgcgtggatgaagaccagcccttcccggctgtgccgaaatggtccatcaaaaaatggctttcgctacctggagagacgcgcccgctgatcctttgcgaatacgcccacgcgatgggtaacagtcttggcggtttcgctaaatactggcaggcgtttcgtcagtatccccgtttacagggcggcttcgtctgggactgggtggatcagtcgctgattaaatatgatgaaaacggcaacccgtggtcggcttacggcggtgattttggcgatacgccgaacgatcgccagttctgtatgaacggtctggtctttgccgaccgcacgccgcatccagcgctgacggaagcaaaacaccagcagcagtttttccagttccgtttatccgggcaaaccatcgaagtgaccagcgaatacctgttccgtcatagcgataacgagctcctgcactggatggtggcgctggatggtaagccgctggcaagcggtgaagtgcctctggatgtcgctccacaaggtaaacagttgattgaactgcctgaactaccgcagccggagagcgccgggcaactctggctcacagtacgcgtagtgcaaccgaacgcgaccgcatggtcagaagccgggcacatcagcgcctggcagcagtggcgtctggcggaaaacctcagtgtgacgctccccgccgcgtcccacgccatcccgcatctgaccaccagcgaaatggatttttgcatcgagctgggtaataagcgttggcaatttaaccgccagtcaggctttctttcacagatgtggattggcgataaaaaacaactgctgacgccgctgcgcgatcagttcacccgtgcaccgctggataacgacattggcgtaagtgaagcgacccgcattgaccctaacgcctgggtcgaacgctggaaggcggcgggccattaccaggccgaagcagcgttgttgcagtgcacggcagatacacttgctgatgcggtgctgattacgaccgctcacgcgtggcagcatcaggggaaaaccttatttatcagccggaaaacctaccggattgatggtagtggtcaaatggcgattaccgttgatgttgaagtggcgagcgatacaccgcatccggcgcggattggcctgaactgccagctggcgcaggtagcagagcgggtaaactggctcggattagggccgcaagaaaactatcccgaccgccttactgccgcctgttttgaccgctgggatctgccattgtcagacatgtataccccgtacgtcttcccgagcgaaaacggtctgcgctgcgggacgcgcgaattgaattatggcccacaccagtggcgcggcgacttccagttcaacatcagccgctacagtcaacagcaactgatggaaaccagccatcgccatctgctgcacgcggaagaaggcacatggctgaatatcgacggtttccatatggggattggtggcgacgactcctggagcccgtcagtatcggcggaattccagctgagcgccggtcgctaccattaccagttggtctggtgtcaaaaataataataaccgggcaggggggatccaattctgtgagcgtatggcaaacgaaggaaaaatagttatagtagccgcactcgatgggacatttcaacgtaaaccgtttaataatattttgaatcttattccattatctgaaatggtggtaaaactaactgctgtgtgtatgaaatgctttaaggaggcttccttttctaaacgattgggtgaggaaaccgagatagaaataataggaggtaatgatatgtatcaatcggtgtgtagaaagtgttacatcgactcataatattatattttttatctaaaaaactaaaaataaacattgattaaattttaatataatacttaaaaatggatgttgtgtcgttagataaaccgtttatgtattttgaggaaattgataatgagttagattacgaaccagaaagtgcaaatgaggtcgcaaaaaaactgccgtatcaaggacagttaaaactattactaggagaattattttttcttagtaagttacagcgacacggtatattagatggtgccaccgtagtgtatataggatctgctcccggtacacatatacgttatttgagagatcatttctataatttaggagtgatcatcaaatggatgctaattgacggccgccatcatgatcctattttaaatggattgcgtgatgtgactctagtgactcggttcgttgatgaggaatatctacgatccatcaaaaaacaactgcatccttctaagattattttaatttctgatgtgagatccaaacgaggaggaaatgaacctagtacggcggatttactaagtaattacgctctacaaaatgtcatgattagtattttaaaccccgtggcgtctagtcttaaatggagatgcccgtttccagatcaatggatcaaggacttttatatcccacacggtaataaaatgttacaaccttttgctccttcatattcagctgaaatgagattattaagtatttataccggtgagaacatgagactgactcgagttaccaaattagacgctgtaaattatgaaaaaaagatgtactaccttaataagatcgtccgtaacaaagtagttgttaactttgattatcctaatcaggaatatgactattttcacatgtactttatgctgaggaccgtgtactgcaataaaacatttcctactactaaagcaaaggtactatttctacaacaatctatatttcgtttcttaaatattccaacaacatcaactgaaaaagttagtcatgaaccaatacaacgtaaaatatctagcaaaaattctatgtctaaaaacagaaatagcaagagatccgtacgcggtaataaatagaaacgtactactgagatatactaccgatatagagtataatgatttagttactttaataaccgttagacataaaattgattctatgaaaactgtgtttcaggtatttaacgaatcatccataaattatactccggttgatgatgattatggagaaccaatcattataacatcgtatcttcaaaaaggtcataacaagtttcctgtaaattttctatacatagatgtggtaatatctgacttatttcctagctttgttagactagatactacagaaactaatatagttaatagtgtactacaaacaggcgatggtaaaaagactcttcgtcttcccaaaatgttagagacggaaatagttgtcaagattctctatcgccctaatataccattaaaaattgttagatttttccgcaataacatggtaactggagtagagatagccgatagatctgttatttcagtcgctgattaatcaattagtagagatgagataagaacattataataatcaataatatatcttatatcttatatcttatatcttatatcttgtttagaaaaatgctaatattaaaatagctaacgctagtaatccaatcggaagccatttgatatctataatagggtatctaatttcctgatttaaatagcggacagctatattctcggtagctactcgtttggaatcacaaacattatttacatctaatttactatctgtaatggaaacgtttcccaatgaaatggtacaatccgatacattgcattttgttatatttttttttaaagaggctggtaacaacgcatcgcttcgtttacatggctcgtaccaacaataatagggtaatcttgtatctattcctatccgtactatgcttttatcaggataaatacatttacatcgtatatcgtctttgttagcatcacagaatgcataaatttgttcgtccgtcatgataaaaatttaaagtgtaaatataactattatttttatagttgtaataaaaagggaaatttgattgtatactttcggttctttaaaagaaactgacttgataaaaatggctgtaatctctaaggttacgtatagtctatatgatcaaaaagagattaatgctacagatattatcattagtcatgttaaaaatgacgacgatatcggtaccgttaaagatggtagactaggtgctatggatggggcattatgtaagacttgtgggaaaacggaattggaatgtttcggtcactggggtaaagtaagtatttataaaactcatatagttaagcctgaatttatttcagaaattattcgtttactgaatcatatatgtattcactgcggattattgcgttcacgagaaccgtattccgacgatattaacctaaaagagttatcgggacacgctcttaggagattaaaggataaaatattatccaagaaaaagtcatgttggaacagtgaatgtatgcaaccgtatcaaaaaattactttttcaaagaaaaaggtttgtttcgtcaacaagttggatgatattaacgttcctaattctctcatctatcaaaagttaatttctattcatgaaaagttttggccattattagaaattcatcaatatccagctaacttattttatacagactactttcccatccctccgttgattattagaccggctattagtttttggatagatagtatacccaaagagaccaatgaattaacttacttattaggtatgatcgttaagaattgtaacttgaatgctgatgaacaggttatccagaaggcggtaatagaatacgatgatattaaaattatttctaataacactaccagtatcaatttatcatatattacatccggcaaaaataatatgattagaagttatatcgtcgcccgacgaaaagatcagaccgctagatctgtaattggtcccagtacatctatcaccgttaatgaggtaggaatgcccgcatatattagaaatacacttacagaaaagatatttgttaatgcctttacagtggataaagttaaacaactattagcgtcaaaccaagttaaattttactttaataaacgattaaaccaattaacaagaatacgccaaggaaagtttattaaaaataaaatacatttattgcctggtgattgggtagaagtagctgttcaagaatatacaagtattatttttggaagacagccgtctctacatagatacaacgtcatcgcttcatctatcagagctaccgaaggagatactatcaaaatatctcccggaattgccaactctcaaaatgctgatttcgacggggatgaggaatggatgatattagaacaaaatcctaaagctgtaattgaacaaagtattcttatgtatccgacgacgttactcaaacacgatattcatggagcccccgtttatggatctattcaagatgaaatcgtagcagcgtattcattgtttaggatacaagatctttgtttagatgaagtattgaacatcttggggaaatatggaagagagttcgatcctaaaggtaaatgtaaattcagcggtaaagatatctatacttacttgataggtgaaaagattaattatccgggtctcttaaaggatggtgaaattattgcaaacgacgtagatagtaattttgttgtggctatgaggcatctgtcattggctggactcttatccgatcataagtcgaacgtggaaggtatcaactttattatcaagtcatcttatgtttttaagagatatctatctatttacggttttggggtgacattcaaagatctgagaccaaattcgacgttcactaataaattggaggccatcaacgtagaaaaaatagaacttatcaaagaagcatacgccaaatatctcaacgatgtaagagacgggaaaatagttccattatctaaagctttagaggcggactatgtggaatccatgttatccaacttgacaaatcttaatatccgagagatagaagaacatatgagacaaacgctgatagatgatccagataataacctcctgaaaatggccaaagcgggttataaagtaaatcccacagaactaatgtatattctaggtacgtatggacaacaaaggattgatggtgaaccagcagagactcgagtattgggtagagttttaccttactatcttccagactctaaggatccagaaggaagaggttacattcttaattctttaacaaaaggattaacgggttctcaatattacttttcgatgctggttgccagatctcaatctactgatatcgtctgtgaaacatcacgtaccggaacactggctagaaaaatcattaaaaagatggaggatatggtggtcgacggatacggacaagtagttataggtaatacgctcatcaagtacgccgccaattataccaaaattctaggctcagtatgtaaacctgtagatcttatctatccagatgagtccatgacttggtatttggaaattagtgctctgtggaataaaataaaacagggattcgtttactctcagaaacagaaacttgcaaagaagacattggcgccgtttaatttcctagtattcgtcaaacccaccactgaggataatgctattaaggttaaggatctgtacgatatgattcataacgtcattgatgatgtgagagagaaatacttctttacggtatctaatatagattttatggagtatatattcttgacgcatcttaatccttctagaattagaattacaaaagaaacggctatcactatctttgaaaagttctatgaaaaactcaattatactctaggtggtggaactcctattggaattatttctgcacaggtattgtctgagaagtttacacaacaagccctgtccagttttcacactactgaaaaaagtggtgccgtcaaacaaaaacttggtttcaacgagtttaataacttgactaatttgagtaagaataagaccgaaattatcactctggtatccgatgatatctctaaacttcaatctgttaagattaatttcgaatttgtatgtttgggagaattaaatccaaacatcactcttcgaaaagaaacagataaatatgtagtagatataatagtcaatagattatacatcaagagagcagaaataaccgaattagtcgtcgaatatatgattgaacgatttatctcctttagcgtcattgtaaaggaatggggtatggagacattcattgaggacgaggataatattagatttactgtctacctaaatttcgttgaaccggaagaattgaatcttagtaagtttatgatggttcttccgggggcagccaacaagggaaagattagtaaattcaagattcctatctctgattatacgggatatgacgacttcaatcaaacaaaaaagctcaataagatgactgtagaactcatgaatctaaaagaattgggttctttcgatttggaaaacgtcaacgtgtatcctggagtatggaatacatacgatatcttcggtatcgaggccgctcgtgaatacttgtgcgaagccatgttaaacacctatggagaagggttcgattatctgtatcagccttgtgatcttctcgctagtttactatgtgctagttacgaaccagaatcagtgaataaattcaagttcggcgcagctagtactcttaagagagctacgttcggagacaataaagcattgttaaacgcggctcttcataaaaagtcagaacctattaacgataatagtagctgccacttttttagcaaggtccctaatataggaactggatattacaaatactttatcgacttgggtcttctcatgagaatggaaaggaaactatctgataagatatcttctcaaaagatcaaggaaatggaagaaacagaagacttttaattcttatcaataacatatttttctatgatctgtcttttaaacgatggattttccacaaatgcgcctctcaagtccctcatagaatgatacacgtataaaaaatatagcataggcaatgactccttatttttagacattagatatgccaaaatcatagccccgcttctatttactcccgcagcacaatgaaccaacacgggctcgtttcgttgatcacatttagataaaaaggcggttacgtcgtcaaaatatttactaatatcggtagttgtatcatctaccaacggtatatgaataatattaatattagagttaggtaatgtatatttatccatcgtcaaatttaaaacatatttgaacttaacttcagatgatggtgcatccatagcatttttataatttcccaaatacacattattggttacccttgtcattatagtgggagatttggctttgtgcatatctccagttgaacgtagtagtaagtatttatacaaacttttcttatccatttataacgtacaaatggataaaactactttatcggtaaacgcgtgtaatttagaatacgttagagaaaaggctatagtaggcgtacaagcagccaaaacatcaacacttatattctttgttattatattggcaattagtgcgctattactctggtttcagacgtctgataatccagtctttaatgaattaacgagatatatgcgaattaaaaatacggttaacgattggaaatcattaacggatagcaaaacaaaattagaaagtgatagaggtagacttctagccgctggtaaggatgatatatttgaattcaaatgtgtggatttcggcgcctattttatagctatgcgattggataagaaaacatatctgccgcaagctattaggcgaggtactggagacgcgtggatggttaaaaaggcggcaaaggtcgatccatctgctcaacaattttgtcagtatttgataaaacacaagtctaataatgttattacttgtggtaatgagatgttaaatgaattaggttatagcggttattttatgtcaccgcattggtgttccgattttagtaatatggaatagtgttagataaatgcggtaacgaatgttcctgtaaggaaccataacagcttagatttaacgttaaagatgagcataaacataataaacaaaattacaatcaaacttataacattaatatcaaacaatccaaaaaatgaaatcagtggagtagtaaacgcgtacataactcctggataacgtttagcagctgccgttcctattctagaccaaaaattcggtttcatgttttcgaaacggtattctgcaacaagtcgaggatcgtgttctacatatttggcggcattatccagtatctgcctattgatcttcatttcgttttcgattctggctatttcaaaataaaatcccgatgatagacctccagactttataatttcatctacgatgttcagcgccgtagtaactctaataatataggctgataagctaacatcataccctcctgtatatgtgaatatggcatgatttttgtccattacaagctcggttttaactttattgcctgtaataatttctctcatctgtaggatatctatttttttgtcatgcattgccttcaagacgggacgaagaaacgtaatatcctcaataacgttatcgttttctacaataactacatattctacctttttattttctaactcggtaaaaaaattagaatcccatagggctaaatgtctagcgatatttcttttcgtttcctctgtacacatagtgttacaaaaccctgaaaagaagtgagtatacttgtcatcatttctaatgtttcctccagtccactgtataaacgcataatccttgtaatgatctggatcatccttgactaccacaacatttcttttttctggcataacttcgttgtcctttacatcatcgaacttctgatcattaatatgctcatgaacattaggaaatgtttctgatggaggtctatcaataactggcacaacaataacaggagttttcaccgccgccatttagttattgaaattaatcatatacaactctttaatacgagttatattttcgtctatccattgtttcacattgacatatttcgacaaaaagatataaaatgcgtattccaatgcttctctgtttaatgaattactaaaatatacaaacacgtcactgtctggcaataaatgatatcttagaatattgtaacaatttattttgtattgcacatgttcgtgatctatgagttcttcttcgaatggcataggatctccgaatctgaaaacgtataaataggagttagaataataatatttgagagtattggtaatatataaactctttagcggtataattagtttttttctctcaatttctatttttagatgtgatggaaaaatgactaattttgtagcattagtatcatgaactctaatcaaaatcttaatatcttcgtcacacgttagctctttgaagtttttaagagatgcatcagttggttctacagatggagtaggtgcaacaattttttgttctacacatgtatgtactggagccattgttttaactataatggtgcttgtatcgaaaaactttaatgcagatagcggaagctcttcgccgcgactttctacgtcgtaattgggttctaacgccgatctctgaatggatactagttttctaagttctaatgtgattctctgaaaatgtaaatccaattcctccggcattatagatgtgtatacatcggtaaataaaactatagtatccaacgatcccttctcgcaaattctagtcttaaccaaaaaatcgtatataaccacggagatggcgtatttaagagtggattcttctaccgttttgttcttggatgtcatataggaaactataaagtccgcactactgttaagaatgattactaacgcaactatatagtttaaattaagcattttggaaacataaaataactctgtagacgatacttgactttcgaataagtttgcagacaaacgaagaaagaacagacctctcttaatttcagaagaaaactttttttcgtattcctgacgtctagagtttatatcaataagaaagttaagaattagtcggttaatgttgtatttcattacccaagtttgagatttcataatattatcaaaagacatgataatattaaagataaagcgctgactatgaacgaaatagctatatggttcgctcaagaatatagtcttgttaaacgtggaaacgataactgtatttttaatcacgtcagcggcatctaaattaaatataggtatatttattccacacactctacaatatgccacaccatcttcataataaataaattcgttagcaaaattattaattttagtgaaatagttagcgtcaactttcatagcttccttcaatctaatttgatgctcacacggtgcgaattccactctaacatcccttttccatgcctcaggttcatcgatctctataatatctagttttttgcgtttcacaaacacaggctcgtctctcgcgatgagatctgtatagtaactatgtaaatgataactagatagaaagatgtagctatatagatgacgatcctttaagagaggtataataactttaccccaatcagatagactgttgttatggtcttcggaaaaagaatttttataaatttttccagtattttccaaatatacgtacttaacatctaaaaaatccttaatgataataggaatggataatccgtctattttataaagaaatacatatcgcacattatacttttttttggaaatgggaataccgatgtgtctacataaatatgcaaagtctaaatattttttagagaatcttagttggtccaaattcttttccaagtacggtaatagatttttcatattgaacggtatcttcttaatctctggttctagttccgcattaaatgatgaaactaagtcactatttttataactaacgattacatcacctctaacatcatcatttaccagaatactgatcttcttttgtcgtaaatacatgtctaatgtgttaaaaaaaagatcatacaagttatacgtcatttcatctgtggtattcttgtcattgaaggataaactcgtactaatctcttctttaacagcctgttcaaatttatatcctatatacgaaaaaatagcaaccagtgtttgatcatccgcgtcaatattctgttctatcgtagtgtataacaatcgtatatcttcttctgtgatagtcgatacgttataaaggttgataacgaaaatatttttatttcgtgaaataaagtcatcgtaggattttggacttatattcgcgtctagtagatatgcttttatttttggaatgatctcaattagaatagtctctttagagtccatttaaagttacaaacaactaggaaattggtttatgatgtataatttttttagtttttatagattctttattctatacttaaaaaatgaaaataaatacaaaggttcttgagggttgtgttaaattgaaagcgagaaataatcataaattatttcattatcgcgatatccgttaagtttgtatcgtaatggcgtggtcaattacgaataaagcggatactagtagcttcacaaagatggctgaaatcagagctcatctaaaaaatagcgctgaaaataaagataaaaacgaggatattttcccggaagatgtaataattccatctactaagcccaaaaccaaacgagccactactcctcgtaaaccagcggctactaaaagatcaaccaaaaaggaggaagtggaagaagaagtagttatagaggaatatcatcaaacaactgaaaaaaattctccatctcctggagtcagcgacattgtagaaagcgtggccgctgtagagctcgatgatagcgacggggatgatgaacctatggtacaagttgaagctggtaaagtaaatcatagtgctagaagcgatctctctgacctaaaggtggctaccgacaatatcgttaaagatcttaagaaaattattactagaatctctgcagtatcgacggttctagaggatgttcaagcagctggtatctctagacaatttacttctatgactaaagctattacaacactatctgatctagtcaccgagggaaaatctaaagttgttcgtaaaaaagttaaaacttgtaagaagtaaatgcgtgcacttttttataaagatggtaaactctttaccgataataattttttaaatcctgtatcagacgataatccagcgtatgaggttttgcaacatgttaaaattcctactcatttaacagatgtagtagtatatgaacaaacgtgggaggaggcgttaactagattaatttttgtgggaagtgattcaaaaggacgtagacaatacttttacggaaaaatgcatgtacagaatcgcaacgctaaaagagatcgtatttttgttagagtatataacgttatgaaacgaattaattgttttataaacaaaaatataaagaaatcgtccacagattccaattatcagttggcggtttttatgttaatggaaactatgttttttattagatttggtaaaatgaaatatcttaaggagaatgaaacagtagggttattaacactaaaaaataaacacatagaaataagtcccgatgaaatagttatcaagtttgtaggaaaggacaaagtttcacatgaatttgttgttcataagtctaatagactatataaaccgctattgaaactgacggatgattctagtcccgaagaatttctgttcaacaaactaagtgaacgaaaggtatacgaatgtatcaaacagtttggtattagaatcaaggatctccgaacgtatggagtcaattatacgtttttatataatttttggacaaatgtaaagtccatatctcctcttccgtcaccaaaaaagttaatagcattaactatcaaacaaactgctgaagtggtaggtcatactccatcaatttcaaaaagagcttatatggcaacgactattttagaaatggtaaaggataaaaattttttagatgtagtatctaaaactacgttcgatgaattcctatctatagtcgtagatcacgttaaatcatctacggatggatgatatagatctttacacaaataattacaagaccgataaatggaaatggataagcgtatgaaatctctcgcaatgacagctttcttcggagagctaagcacattagatattatggcattgataatgtctatatttaaacgccatccaaacaataccattttttcagtggataaggatggtcagtttatgattgatttcgaatacgataattataaggcttctcaatatttggatctgaccctcactccgatatctggagatgaatgcaagactcacgcatcgagtatagccgaacaattggcgtgtgcggatattattaaagaggatattagcgaatatatcaaaactactccccgtcttaaacgatttataaaaaaataccgcaatagatcagatactcgtatcagtcgagatacagaaaagcttaaaatagctctagctaaaggcatagattacgaatatataaaagacgcttgttaataagtaaatgaaaaaaaactagtcgtttataataaaacacgatatggatgccaacgtagtatcattttctactattgcgacgtatatagacgctttagcgaagaatgcttcggaattagaacagaggtctaccgcatacgaaataaataatgaattggaactagtatttattaagccgccattgattactttgacaaatgtagtgaatatctctacgattcaggaatcgtttattcgatttaccgttactaataaggaaggtgttaaaattagaactaagattccattatctaaggtacatggtctagatgtaaaaaatgtacagttagtagatgctatagataacatagtttgggaaaagaaatcattagtgacggaaaatcgtcttcacaaagaatgcttgttgagactatcgacagaggaacgtcatatatttttggattacaagaaatatggatcctctatccgactagaattagtcaatcttattcaagcaaaaacaaaaaactttacgatagactttaagctaaaatattttctaggatccggtgcccagtctaaaagttctttgttgcacgctattaatcatccaaagtcaaggcctaatacatctctggaaatagaattcacacctagagacaatgaaacagttccatatgatgaactaataaaggaattgacgactctctcgcgtcatatatttatggcttctccagagaatgtaattctttctccgcctattaacgcgcctataaaaacctttatgttgcctaaacaagatatagtaggtttggatctggaaaatctatatgccgtaactaagactgacggcattcctataactatcagagttacatcaaacgggttgtattgttattttacacatcttggttatattattagatatcctgttaagagaataatagattccgaagtagtagtctttggtgaggcagttaaggataagaactggaccgtatatctcattaagctaatagagcctgtgaatgcaatcaatgatagactagaagaaagtaagtatgttgaatctaaactagtggatatttgtgatcggatagtattcaagtcaaagaaatacgaaggtccgtttactacaactagtgaagtcgtcgatatgttatctacatatttaccaaagcaaccagaaggtgttattctgttctattcaaagggacctaaatctaacattgattttaaaattaaaaaggaaaatactatagaccaaactgcaaatgtagtatttaggtacatgtccagtgaaccaattatctttggagaatcgtctatctttgtagagtataagaaatttagcaacgataaaggctttcctaaagaatatggttctggtaagattgtgttatataacggcgttaattatctaaataatatctattgtttggaatatattaatacacataatgaagtgggtattaagtccgtggttgtacctattaagtttatagcagaattcttagttaatggagaaatacttaaacctagaattgataaaaccatgaaatatattaactcagaagattattatggaaatcaacataatatcatagtcgaacatttaagagatcaaagcatcaaaataggagatatctttaacgaggataaactatcggatgtgggacatcaatacgccaataatgataaatttagattaaatccagaagttagttattttacgaataaacgaactagaggaccgttgggaattttatcaaactacgtcaagactcttcttatttctatgtattgttccaaaacatttttagacgattccaacaaacgaaaggtattggcgattgattttggaaacggtgctgacctggaaaaatacttttatggagagattgcgttattggtagcgacggatccggatgctgatgctatagctagaggaaatgaaagatacaacaaattaaactctggaattaaaaccaagtactacaaatttgactacattcaggaaactattcgatccgatacatttgtctctagtgtcagagaagtattctattttggaaagtttaatatcatcgactggcagtttgctatccattattcttttcatccgagacattatgctaccgtcatgaataacttatccgaactaactgcttctggaggcaaggtattaatcactaccatggacggagacaaattatcaaaattaacagataaaaagacttttataattcataagaatttacctagtagcgaaaactatatgtctgtagaaaaaatagctgatgatagaatagtggtatataatccatcaacaatgtctactccaatgactgaatacattatcaaaaagaacgatatagtcagagtgtttaacgaatacggatttgttcttgtagataacgttgatttcgctacaattatagaacgaagtaaaaagtttattaatggcgcatctacaatggaagatagaccgtctacaaaaaactttttcgaactaaatagaggagccattaaatgtgaaggtttagatgtcgaagacttacttagttactatgttgtttatgtcttttctaagcggtaaataataatatggtatgggttctgatctcccagttctaaatgcattaaataattccaatagagcgatttttgttcctataggaccttccaactgtggatactctgtattgttaatagatatattaatacttttgtcgggtaacagaggttctacgtcttctaaaaataaaagttttataacatctggcctgttcataaataaaaacttggcgattctatatatactcttattatcaaatctagccattgtcttatagatgtgagctactgtaggtgtaccatttgattttctttctaatactatatatttctctcgaagaagttcttgcacatcatctgggaataaaatactactgttgagtaaatcagttattttttttatatcgatattgatggacatttttatagttaaggataataagtatcccaaagtcgataacgacgataacgaagtatttatacttttaggaaatcacaatgactttatcagattaaaattaacaaaattaaaggagcatgtatttttttctgaatatattgtgactccagatacatatggatctttatgcgtcgaattaaatgggtctagttttcagcacggcggtagatatatagaggtggaggaatttatagatgctggaagacaagttagatggtgttctacatccaatcatatatctaaagatatacccgaagatatgcacactgataaatttgtcatttatgatatttatacgtttgattcgttcaagaataaacgattggtattcgtacaggtacctccgtcgttaggagatgatagtcatttgactaatccgttattgtcaccgtattatcgtaattcagtagccagacaaatggtcaatgatatgatttttaatcaagattcatttttaaaatatttattagaacatctgattagaagccactatagagtttctaaacatataacaatagttagatacaaggataccgaagaattaaatctaacgagaatatgttataatagagataagtttaaggcgtttgtattcgcttggtttaacggcgtttcggaaaatgaaaaggtactagatacgtataaaaaggtatctaatttgatataatgaattcagtgactgtatcacacgcgccatatactattacttatcacgatgattgggaaccagtaatgagtcaattggtagagttttataacgaagtagccagttggctgctacgagacgagacgtcgcctattcctgataagttctttatacagttgaaacaaccgcttagaaataaacgagtatgtgtgtgtggtatagatccgtatccgaaagatggaactggtgtaccgttcgaatcaccaaattttacaaaaaaatcaattaaggagatagcttcatctatatctagattaaccggagtaattgattataaaggttataaccttaatataatagacggggttataccctggaattattacttaagttgtaaattaggagaaacaaaaagtcacgcgatttactgggataagatttccaagttactgctgcagcatataactaaacacgttagtgttctttattgtttgggtaaaacagatttctcgaatatacgggccaagttagaatccccggtaactaccatagtcggatatcatccagcggctagagaccgccaattcgagaaagatagatcatttgaaattatcaacgttttactggaattagacaacaaggcacctataaattgggctcaagggtttatttattaatgctttagtgaaattttaacttgtgttctaaatggatgcggctattagaggtaatgatgttatctttgttcttaagactataggtgtcccgtcagcgtgcagacaaaatgaagatccaagatttgtagaagcatttaaatgcgacgagttagaaagatatattgagaataatccagaatgtacactattcgaaagtcttagggatgaggaagcatactctatagtcagaattttcatggatgtagatttagacgcgtgtctagacgaaatagattatttaacggccattcaagattttattatcgaggtgtcaaactgtgtagctagattcgcgtttacagaatgcggcgccattcatgaaaatgtaataaaatccatgagatctaatttttcattgactaagtctacaaatagagataaaacaagttttcatattatctttttagatacgtataccactatggatacattgatagctatgaaacgaacactattagaattaagtagatcatctgaaaatccactaaccagatcgatagacactgccgtatataggagaaaaacaactcttcgggttgtaggtactaggaaaaatccaaattgcgacactattcatgtaatgcaaccaccgcatgataatatagaagattacctattcacttacgtggatatgaacaacaatagttattacttttctctacaacaacgattggaggatttagttcctgataagttatgggaaccagggtttatttcattcgaagacgctataaaaagagtttcaaaaatattcattaattctataataaactttaatgatctcgatgaaaataattttacaacggtaccactggtcatagattacgtaacaccttgtgcattatgtaaaaaacgatcgcataaacatccgcatcaactatcgttggaaaatggtgctattagaatttacaaaactggtaatccacatagttgtaaagttaaaattgttccgttggatggtaataaactgtttaatattgcacaaagaattttagacactaactctgttttattaaccgaacgaggagaccatatagtttggattaataattcatggaaatttaacagcgaagaacccttgataacaaaactaattttgtcaataagacatcaactacctaaggaatattcaagcgaattactctgtccaagaaaacgaaagactgtagaagctaacatacgagacatgttagtagattcagtggagaccgatacctatccggataaacttccgtttaaaaatggtgtattggacctggtagacggaatgttttactctggagatgatgctaaaaaatatacgtgtactgtatcaaccggatttaaatttgacgatacaaagttcgtcgaagacagtccagaaatggaagagttaatgaatatcattaacgatatccaaccattaacggatgaaaataagaaaaatagagagctatatgaaaaaacattatctagttgtttatgcggtgctaccaaaggatgtttaacattcttttttggagaaactgcaactggaaagtcgacaaccaaacgtttgttaaagtctgctatcggtgacctgtttgttgagacgggtcaaacaattttaacagatgtattggataaaggacctaatccatttatcgctaacatgcatttgaaaagatctgtattctgtagcgaactacctgattttgcctgtagtggatcaaagaaaattagatctgacaatattaaaaagttgacagaaccttgtgtcattggaagaccgtgtttctccaataaaattaataatagaaaccatgcgacaatcattatcgatactaattacaaacctgtttttgataggatagataacgcattaatgagaagaattgccgtcgtgcgattcagaacacacttttctcaaccttctggtagagaggctgctgaaaataatgacgcgtacgataaagtcaaactattagacgaggggttagatggtaaaatacaaaataatatatatagatttgcatttctatacttgttggtgaaatggtacaaaaaatatcatgttcctattatgaaactatatcctacacccgaagagattcctgactttgcattctatctcaaaataggtactctgttggtatctagctctgtaaagcatattccattaatgacggacctctccaaaaagggatatatattgtacgataatgtggtcactcttccgttgactactttccaacagaaaatatccaagtattttaattctagactatttggacacgatatagagagcttcatcaatagacataagaaatttgccaatgttagtgatgaatatctgcaatatatattcatagaggatatttcatctccgtaaatatatgctcatatatttatagaagatatcacatatctaaatgaataccggaatcatagatttatttgataatcatgttgatagtataccaactatattacctcatcagttagctactctagattatctagttagaactatcatagatgagaacagaagcgtgttattgttccatattatgggatcaggtaaaacaataatcgctttgttgttcgccttggtagcttccagatttaaaaaggtttacattctagtgccgaacatcaacatcttaaaaattttcaattataatatgggtgtagctatgaacttgtttaatgacgaattcatagctgagaatatctttattcattccacaacaagtttttattctcttaattataacgataacgtcattaattataacggattatctcgctacaataactctatttttatcgttgatgaggcacataatatctttgggaataatactggagaacttatgaccgtgataaaaaataaaaacaagattccttttttactattgtctggatctcccattactaacacacctaatactctgggtcatattatagatttaatgtccgaagagacgatagattttggtgaaattattagtcgtggtaagaaagtaattcagacacttcttaacgaacgcggtgtgaatgtacttaaggatttgcttaaaggaagaatatcatattacgaaatgcctgataaagatctaccaacgataagatatcacggacgtaagtttctagatactagagtagtatattgtcacatgtctaaacttcaagagagagattatatgattactagacgacagctatgttatcatgaaatgtttgataaaaatatgtataacgtgtcaatggcagtattgggacaacttaatctgatgaataatttagatactttatttcaggaacaggataaggaattgtacccaaatctgaaaataaataatggcgtgttatacggagaagaattggtaacgttaaacattagttccaaatttaaatactttattaatcggatacagacactcaacggaaaacattttatatacttttctaattctacatatggcggattggtaattaaatatatcatgctcagtaatggatattctgaatataatggttctcagggaactaatccacatatgataaacggcaaaccaaaaacatttgctatcgttactagtaaaatgaaatcgtctttagaggatctattagatgtgtataattctcctgaaaacgatgatggtagtcaattgatgtttttgttttcatcaaacattatgtccgaatcctatactctaaaagaggtaaggcatatttggtttatgactatcccagatactttttctcaatacaaccaaattcttggacgatctattagaaaattctcttacgccgatatttctgaaccagttaatgtatatcttttagccgccgtatattccgatttcaatgacgaagtgacgtcattaaacgattacacacaggatgaattaattaatgttttaccatttgacatcaaaaagctgttgtatctaaaatttaagacgaaagaaacgaatagaatatactctattcttcaagagatgtctgaaacgtattctcttccaccacatccatcaattgtaaaagttttattgggagaattggtcagacaatttttttataataattctcgtattaagtataacgataccaagttacttaaaatggttacatcagttataaaaaataaagaagacgctaggaattacatagatgatattgtaaacggtcacttctttgtatcgaataaagtatttgataaatctcttttatacaaatacgaaaacgatattattacagtaccgtttagactttcctacgaaccatttgtttggggagttaactttcgtaaagaatataacgtggtatcttctccataaaactgatgagatatataaagaaataaatgtcgagctttgttaccaatggatacctttccgttacattggaaccacacgagctgacgttagacataaaaactaatattaggaatgccgtatataagacgtatctccatagagaaattagtggtaaaatggccaagaaaatagaaattcgtgaagacgtggaattacctctcggcgaaatagttaataattctgtagttataaacgttccgtgtgtaataacctacgcgtattatcacgttggggatatagtcagaggaacattaaacatcgaagatgaatcaaatgtaactattcaatgtggagatttaatctgtaaactaagtagagattcgggtactgtatcatttagcgattcaaagtactgcttttttcgaaatggtaatgcgtatgacaatggcagcgaagtcactgccgttctaatggaggctcaacaaggtatcgaatctagttttgtttttctcgcgaatatcgtcgactcataaaaaagagaatagcggtaagtataaacacgaatactatggcaataattgcgaatgttttattctcttcgatatatttttgataatatgaaaaacatgtctctctcaaatcggacaaccatctcataaaatagttctcgcgcgctggagaggtagttgccgctcgtataatctctccagaataatatacttgcgtgtcgtcgttcaatttatacggatttctatagttctctgttatataatgcggtttgccctcatgattagacgacgacaatagtgttctaaatttagatagttgatcagaatgaatgtttattggcgttggaaaaattatccatacagcgtctgcagagtggttgatagttgttcctagatatgtaaaataatccaacttactaggcagcaaattgtctagataaaatactgaatcaaacggtgcagacgtattggcggatctaatggaatccaattgattaactatcttttgaaaatatacatttttatgatccaatacttgtaagaatatagaaataatgataagtccatcatcgtgtttttttgcctcttcataagaactatattttttcttattccaatgaacaagattaatctctccagagtatttgtacacatctatcaagtgattggatccataatcgtcttcctttccccaatatatatgtagtgatgataacacatattcattggggagaaaccctccacttatatatcctcctttaaaattaatccttactagttttccagtgttctggatagtggttggtttcgactcattataatgtatgtctaacggcttcaatcgcgcgttagaaattgcttttttagtttctatattaataggagatagttgttgcggcatagtaaaaatgaaatgataactgtttaaaaatagctcttagtatgggaattacaatggatgaggaagtgatatttgaaactcctagagaattaatatctattaaacgaataaaagatattccaagatcaaaagacacgcatgtgtttgctgcgtgtataacaagtgacggatatccgttaataggagctagaagaacttcattcgcgttccaggcgatattatctcaacaaaattcagattctatctttagagtatccactaaactattacggtttatgtactacaatgaactaagagaaatctttagacggttgagaaaaggttctatcaacaatatcgatcctcactttgaagagttaatattattgggtggtaaactagataaaaaggaatctattaaagattgtttaagaagagaattaaaagaggaaagtgatgaacgtataacagtaaaagaatttggaaatgtaattctaaaacttacaacacgggataaattatttaataaagtatatataagttattgcatggcgtgttttattaatcaatcgttggaggatttatcgcatactagtatttacaatgtagaaattagaaagattaaatcattaaatgattgtattaacgacgataaatacgaatatctgtcttatatttataatatgctagttaatagtaaatgaacttttacagatctagtataattagtcagattattaagtataatagacgactagctaagtctattatttgcgaggatgactctcaaattattacactcacggcattcgttaaccaatgcctatggtgtcataaacgagtatccgtgtccgctattttattaactactgataacaaaatattagtatgtaacagacgagatagttttctctattctgaaataattagaactagaaacatgtttagaaagaaacgattatttctgaattattccaattatttgaacaaacaggaaagaagtatactatcgtcatttttttctctagatccagctactactgataatgatagaatagacgctatttatccgggtggcatacccaaaaggggtgagaatgttccagagtgtttatccagggaaattaaagaagaagttaatatagacaattcttttgtattcatagacactcggttttttattcatggcatcatagaagataccattattaataaattttttgaggtaatcttctttgtcggaagaatatctctaacgagtgatcaaatcattgatacatttaaaagtaatcatgaaatcaaggatctaatatttttagatccgaattcaggtaatggactccaatacgaaattgcaaaatatgctctagatactgcaaaacttaaatgttacggccatagaggatgttattatgaatcattaaaaaaattaactgaggatgattgattaaaaaatataaattaatttaccatcgtgtatttttataacgggattgtccggcatatcatgtagatagttaccgtctacatcgtatactcgaccatctacgcctttaaatcctctatttattgacattaatctattagaattggaataccaaatattagtaccctcaattagtttattggtaatattttttttagacgatagatcgatggctcttgaaaccaaggttttccaaccggactcattgtcgatcggtgagaagtctttttcattagcatgaatccattctaatgatgtatgtttaaacactctaaacaattggacaaattcttttgatttgctttgaatgatttcaaataggtcttcgtctacagtaggcataccattagataatctagccattataaagtgcacgtttacatatctacgttctggaggagtaagaacgtgactattgagacgaatggctcttcctactatctgacgaagagacgcctcgttccatgtcatatctaaaatgaagatatcattaattgagaaaaaactaataccctcgcctccactagaagagaatacgcatgttttaatgcattctccgttagtgtttgattcttggttaaactcagccaccgccttgattctagtatcttttgttctagatgagaactctatattagagataccaaagactttgaaatatagtaataagatttctattcctgactgattaacaaatggttcaaagactagacatttaccatgggatgctaatattcccaaacatacatctataaatttgacgcttttctcttttaattcagtaaatagagagatatcagccgcactagcatcccctttcaatagttctccctttttaaaggtatctaatgcggatttagaaaactctctatctcttaatgaatttttaaaatcattatatagtgttgctatctcttgcgcgtattcgcccggatcacgattttgtctttcaggaaagctatcgaacgtaaacgtagtagccatacgtctcagaattctaaatgatgatatacctgtttttatttcagcgagtttagccttttgataaatttcttcttgctttttcgacatattaacgtatcgcattaatactgttttcttagcgaatgatgcagacccttctacgtcatcaaaaatagaaaactcgttattaactatatacgaacatagtcctcctagtttggagactaattctttttcatcgactagacgtttattctcaaatagcgattggtgttgtaaggatcctggtcgtagtaagttaaccaacatggtgaattcttgcacactattgacgataggtgtagccgataaacaaatcatcttatggttttttaacgcaatggtcttagataaaaaattatatactgaacgagtaggacggatcttaccatcttctttgattaatgatttagaaatgaagttatgacattcatcaataatgacgcatattctactcttggaattaatagttttgatattagtaaaaaatttatttctaaaattttgatcatcgtaattaataaaaatacaatccttcgttatctctggagcgtatctgagtatagtgttcatccaaggatcttctatcaaagcctttttcaccaataagataatagcccaattcgtataaatatccttaagatgtttgagaatatatacagtagtcattgttttaccgacacccgtttcatggaacaataaaagagaatgcatactgtctaatcctaagaaaactcttgctacaaaatgttgataatccttgaggcgtactacgtccgaccccatcatttcaacgggcatattagtagttctgcgtaaggcataatcgatataggccgcgtgtgatttactcatttatgagtgataagtaataactatgttttaaaaatcacagcagtagtttaactagtcttctctgatgtttgttttcgatactttttgaatcagaagtcatactagaataaagcaacgagtgaacgtaatagagagcttcgtatactctattcgaaaactctaagaacttattaatgaattccgtatccactggattgtttaaaatactaaattgaacactgttcacatccttccaagaagaagacttagtgacggacttaacatgagacataaataaatccaaattttttttacaaacatcactagccaccataatggcgctatctttcaaccagctatcgcttacgcattttagcagtctaacatttttaaagagactacaatatattctcatagtatcgattacacctctaccgaataaagttggaagtttaataatacaatatttttcgtttacaaaatcaaataatggtcgaaacacgtcgaaggttaacatcttataatcgctaatgtatagattgttttcagtgagatgattattagatttaatagcatctcgttcacgtttgaacagtttattgcgtgcgctgaggtcggcaactacggcgtccgctttagtactcctcccataatactttacgctattaatctttaaaatttcatagactttatctagatcgctttctggtaacatgatatcatgtgtaaaaagttttaacatgtcggtcggcattctatttagatcattaactctagaaatctgaagaaagtaattagctccgtattccagactaggtaatgggcttttacctagagacagattaagttctggcaatgtttcataaaatggaagaaggacatgcgttccctcccggatattttttacaatttcatccatttacaactctatagtttgttttcattattattagttattatctcccataatcttggtaatacttaccccttgatcgtaagataccttatacaggtcattacatacaactaccaattgtttttgtacataatagattggatggttgacatccatggtggaataaactactcgaacagatagtttatctttccccctagatacattagccgtaatagttgtcggcctaaagaatatctttggtgtaaagttaaaagttagggttcttgttccattattgctttttgtcagtagttcattataaattctcgagatgggtccgttctctgaatatagaacatcatttccaaatctaacttctagtctagaaataatatcggtcttattcttaaaatctattcccttgatgaagggatcgttaatgaacaaatccttggcctttgattcggctgatctattatctccgttatagacgttacgttgactagtccaaagacttacaggaatagatgtatcgatgatgttgatactatgtgatatgtgagcaaagattgttctcttagtggcatcactatatgttccagtaatggcggaaaactttttagaaatgttatatataaaagaattttttcgtgttccaaacattagcagattagtatgaagataaacactcatattatcaggaacattatcaatttttacatacacatcagcatcttgaatagaaacgataccatcttctggaacctctacgatctcggcagactccggataaccagtcggtgggccatcgctaacaataactagatcatccaacaatctactcacatatgcatctatataatctttttcatcttgtgagtaccctggatacgaaataaatttattatccgtatttccataataaggtttagtataaacagagagagatgttgccgcatgaacttcagttacagtcgccgttggttggtttatttgacctattactctcctaggtttctctataaacgatggtttaatttgtacattcttaaccatatatccaataaagctcaattcaggaacataaacaaattctttgttgaacgtttcaaagtcgaacgaagagtcacgaataacgatatcggatactggattgaaggttaccgttacggtaatttttgaatcggatagtttaagactgctgaatgtatcttccacatcaaacggagttttaatataaacgtatactgtagatggttctttaatagtgtcattaggagttaggccaatagaaatatcattaagttcactagaatatccagagtgtttcaaagcaattgtattattgatacaattattatataattcttcgccctcaatttcccaaataacaccgttacacgaagagatagatacgtgattaatacatttatatccaacatatggtacgtaactgaatcttcccatacctttaacttctggaagttccaaactcagaaccaaatgattaagcgcagtaatatactgatccctaatttcgaagctagcgatagcctgattgtctggaccatcgtttgtcataactccggatagagaaatatattgcggcatatacaaagttggaatttgactatcgactgcgaagacattagaccgtttaatagagtcatccccaccgatcaaagaattaatgatagtattattcattttctatttaaaatggaaaaagcttacaataaactccgtagagaaatatctataatttgtgagttttccttaaagtaacagcttccgtaaacgccgtctttatctcttagtaggtttattgtatttatgaccttttccttatcttcatagaatactaaaggcaacaaagaaatttttggttcttctctaagagctacgtgagacttaaccatagaagccaacgaatccctacatattttagaacagaaataccctacttcaccacccttgtatgtctcaatactaataggtctaaaaaccaaatcttgattacaaaaccaacacttatcaattacactatttgtcttaatagacacatctgccatagatttataatactttggtagtatacaagcgagtgcttcttctttagcgggcttaaagactgctttaggtgctgaaataaccacatctggaaggcttactcgcttagccatttaattacggaactatttttttatacttctaatgagcaagtagaaaacctctcatctacaaaaacgtactcgtgtccataatcctctaccatagttacacgttttttagatctcatatgtgctaaaaagttttcccatactaattggttactattatttttcgtataatttttaacagtttgaggttttagatttttagttacagaagtgatatcgaatattttatccaaaaagaatgaataattaattgtcttagaaggagtgttttcttggcaaaagaataccaagtgcttaaatatttctactacttcattaatcttttctgtactcagattcagtttctcatcttttacttgattgattatttcaaagactaacttataatcctttttatttattctctcgttagccttaagaaaactagatacaaaatttgcatctacatcatccgtggatatttgatttttttccatgatatccaagagttccgagataatttctccagaacattgatgagacaataatctccgcaatacatttctcaaatgaataagtttattagacacgtggaagtttgactttttttgtacctttgtacatttttgaaataccgactcgcaaaaaatacaatattcatatccttgttcagatactataccgttatgtctacaaccgctacataatcgtagattcatgttaacactctacgtatctcgtcgtccaatattttatataaaaacattttatttctagacgttgccagaaaatcctgtaatatttttagttttttgggctgtgaataaagtatcgccctaatattgttaccgtcttccgccaatatagtagttaaattatccgcacatgcagaagaacaccgcttaggcggattcagtacaatgttatatttttcgtaccaactcatttaaatatcataatctaaaatagttctgtaatatgtctagcgctaatatattgatcataatcctgtgcataaattaagatacaacaatgtctcgaaatcatcgacatggcttcttccatagttagaagatcgtcgtcaaagttagcaacgtgattcatcaacatttgctgttttgaggcagcaaatactgaaccgtcgccattcaaccattcataaaaaccatcgtctgaatccattgataatttcttgtactggtttttgagagctcgcatcaatctagcatttctagctcccggattgaaaacagaaagaggatcgtacatccagggtccattttctgtaaatagaatcgtataatgtcccttcaagaagatatcagacgatccacaatcaaagaattggtctccgagtttgtaacaaactgcggactttaacctatacatgataccgtttagcataatttctggtgatacgtcaatcggagtatcatctattagagatctaaagccggtgtaacattctccaccaaacatattcttattctgacgtcgttctacataaaacatcattgctccattaacgataacaggggaatgaacagcactacccatcacattagttcccaatggatcaatgtgtgtaactccagaacatcttccatagcctatgttaggaggagcgaacaccactcttccactattgccatcgaatgccatagaataaatatccttggaattgatagaaatcggactgtcggatgttgtgatcatcttcataggattaacaactatgtatggtgccgcctgaagtttcatatcgtaactgatgccgtttataggtctagccacagaaaccaacgtaggtctaaatccaactatagacaaaatagaagccaatatctgttcctcatctgtcataacttgagagcatccagtatgaataatcttcattagatggggatctaccgcatcatcatcgttacaataaaaaattcccattctaatgttcataattgcttttctaatcatggtatgcatgtttgctctctgaatctctgtggaaattagatctgatacacctgtaatcactatcggattatcctccgtaagacgattaaccaacaacatataattataagactttacttttctaaattcataaagttgctggattaggctataggtgtctccatgtacatacgcgttctcgagcgcaggaagtttaataccgaatagtgccatcagaataggatgaatatagtaattagtttctggttttctataaataaaagacaaatcttgtgaactagacatatcggtaaaatgcatggattggaatcgtgtagtcgacagaagaatatgatgattagatggagagtatattttatctaactctttgagttggtcaccgattctaggactagctcgagaatgaataagtactaaaggatgagtacatttcacagaaacactagcattgttcaatgtgctctttacatgggtaaggagttgaaatagctcgtttctatttgttctgacaatatttagtttattcataatgttaagcatatcctgaatagtaaagttagatgtgtcatacttgttagtagttagatatttagcaattgcattcccatcatttctcaatctcgtactccaatcatgcgtggatgctacttcgtcgatggaaaccatacaatcctttttgataggctgttgagattgatcatttcctgcacgtttaggtttggtacgttgatttctagcccctgcggatataaagtcatcgtctacaatttgggacaatgaattgcatacactacaagacaaagatttatcagaagtgtgaatatgatcttcatctaccaaagaaagagtttgattagtataactagattttagtcctgcgttagatgttaaaaaaacatcgctattgaccacggcttccattatttatattcgtagtttttactcgaaagcgtgattttaatatccaatcttattacttttggaatcgttcaaaacctttgactagttgtagaatttgatctattgccctacgcgtatactcccttgcatcatatacgttcgtcaccagatcgtttgtttcggcctgaagttggtgcatatctctttcaacattcgacatgagatccttaagggccatatcgtctagattttgttgagatgctgctcctggatttggattttgttgtgctgttgtacatactgtaccaccagtaggtgtaggagtacatacagtggccacaataggaggttgagaaagtgtaaccgttggagtagtacaagaaatacttccatccgattgttgtgtacatgtagttgttggtaacgtctgagaaggttgggtagatggcggcgtcgtcgttttttgatctttattaaatttagagataatatcctgaacagcattgctcggcgtcaacgctggaaggagtgaactcgccggcgcatcagtatcttcagacagccaatcaaaaagattagacatatcagatgatgtattagtttgttgtcgtggttttggtgtaggagcagtactactaggtagaagaataggagccgatgtagctgttggaaccggctgtggagttatatgaatagttggttgtagcggttggataggctgtctgctggcggccatcatattatctctagctagttgttctcgcaactgtctttgataatacgactcttgagactttagtcctatttcaatcgcttcatcctttttcgtatccggatccttttcttcagaataatagattgacgactttggtgtagaggattctgccagcctctgtgagaacttgttaaagaagtccatttaaggctttaaaattgaattgcgattataagattaaatggcagacacagacgatattatcgactatgaatccgatgatctcaccgaatacgaggatgatgaagaagaggaagaagatggagagtcactagaaactagtgatatagatcccaaatcttcttataagattgtagaatcagcatccactcatatagaagatgcgcattccaatcttaaacatatagggaatcatatatctgctcttaaacgacgctatactagacgtataagtctatttgaaatagcgggtataatagcagaaagctataacttgcttcaacgaggaagattacctctagtttcagaattttctgacgaaacgatgaagcaaaatatgctacatgtaattatacaagagatagaggagggttcttgtcctatagtcatcgaaaagaacggagaattgttgtcggtaaacgattttgacaaagatggtctaaaattccatctagactatattatcaaaatttggaaacttcaaaaacgatattagaatttatacgaatatcgttctctaaatgtcacaatcaagtctcgcatgttcagcaatttattgtcgtactttatatcgtgttcattaacgatatcttgcaaaatagtaatgattctatcttccttcgatagatattcttcagagattattgtcttatattctttcttgttatcagatatgaatttgataagactttgaacattattgatacccgtctgtttaattttttctacagatattttagttttggcagattctatcgtatctgtcaatagacatccaacatcgacattcgacgtcaattgtctataaatcaacgtataaattttagaaataacattagcgaattgttgtgcgttgatgtcgttattctgaaacagtatgattttaggtagcattttcttaacaaagagaacgtatttattgttactcagttgaacagatgatatatccagattactaacgcatctgattccgtataccaaactttcagaagaaatggtatacaattgtttgtattcattcaatgtctctttttcagaaattagtttagagtcgaatactgcaataattttcaagagatagttttcatcagataagattttatttagtgtagatatgataaaactattgttttgttggagaacttgatacgccgcgttctctgtagtcgacgctctcaaatgggaaacaatctccattatttttttggaatcggatactatatcttcggtatcttgacgcagtctagtatacatagagttaagagagattagagtttgtacattaagcaacatgtctctaaatgtggctacaaacttttcctttttcacatcatctagtttattatataccgatttcacaacggcaccagatttaaggaaccagaatgaaaaactctgataactacaatatttcatcatagttacgattttatcatcttctatagttggtgtaatagcgcatacctttttctccaagactggaaccaacgtcataaaaatgtttaaatcaaaatccatatcaacatctgatgcgctaagaccagtctcgcgttcaagattatctttactaatggtgacgaactcatcgtataaaactctaagtttgtccattatttatttacagatttagttgtttaatttatttgtgctcttccagagttgggatagtatttttctaacgtcggtattatattattaggatctacgttcatatgtatcataatattaatcatccacgttttgataaatctatctttagcttctgaaataacgtatttaaacaaaggagaaaaatatttagctacggcatcagacgcaataacattttttgtaaatgtaacgtatttagacgacagatcttcgttaaaaagttttccatctatgtagaatccatcggttgttaacaccattcccgcgtcagattgaataggagtttgaatagtttgttttggaaatagatccttcaataacttatagttgggtgggaaaaaatcgattttatcactagactctttcttttttactatcattacctcatgaactatttcttgaatgagtatatgtattttctttcctatatcggacgcgttcattggaaaatataccatgtcgttaactataagaatatttttatcctcgtttacaaactgaataatatcagatgtagttcgtaaacgaactatatcatcaccagcacaacatctaactatatgatatccactagtttcctttagccgtttattatcttgttccatattagcagtcattccatcatttaagaaggcgtcaaaaataatagggagaaatgacattttggattctgttacaactttaccaaaattaaggatatacggacttactatctttttctcaacgtcaatttgatgaacacacgatgaaaatgtgcttctatgagattgatcatgtagaaaacaacaagggatacaatatttccgcatatcatgaaatatattaagaaatcccaccttattatatttccccaaaggatccatgcacgtaaacattatgccgttatcattaataaagacttctttctcatcggatctgtaaaagttgttactgatttttttcattccaggatctagataattaataatgatgggttttctattcttattctttgtattttggcatatcctagaccagtaaacagtttccactttggtaaaatcagcagacttttgaacgctattaaacatggcattaatggcaataactaaaaatgtaaaatatttttctatgttaggaatatggtttttcactttaatagatatatggtttttggccaaaatgatagatatttttttatccgaggatagtaaaatattattagtcgccgtctctataaaaatgaagctagtctcgatatccaattttattctagaattgataggagtcgccaaatgtaccttatacgttatatctcccttgatgcgttccatttgtgtatctatatcggacacaagatctgtaaatagttttacgttattaatcatcacggtatcgccgtcgctagataacgctaatgtaccatccaagtcccaaatggagagatttaactgttcatcgtttagaataaaatgattaccggtcatattaataaagtgttcatcgtatctagataacaacgacttataattaatgtccaagtcttgaactcgctgaatgatcttttttaacccagttagttttagattggtacgaaatatattgttaaactttgattctacagtaatgtccaaatctagttgtggaaatacttccatcaacattgtttcaaacttgataatattattatctacatcttcgtacgatccaaattccggaatagatgtatcgcacgctctggccacccagataaccaaaaagtcacacgctccaggatatacattgtataaaaagctatcgttttttagtagggtttttttctgcgtgtatacgaagggattaaaaatagtattatcaacgtaactatattccaaattattcttatgagaatagataataatatcgtccttaatatctaacaaatttcctaaatatccctttaattgagtcattcgaagcgtcaatagaatatgtctcttaactatttccggctgttgtatatttaaatgacttcgtaaaaaataatatatgggcgacttctcatctatgtaatcatatggagtgagatatagggctcgttctacctcctgccccttacccacctgtaataccaattgcggacttactatatatcgcatatttatatcgtggggtaaagtgaaaatctactaccgatgatgtaagtcttacaatgttcgaaccagtaccagatcttaatttggaggcctccgtagaactaggggaggtaaatatagatcaaacaacacctatgataaaggagaatagcggttttatatcccgcagtagacgtctattcgcccatagatctaaggatgatgagagaaaactagcactacgattctttttacaaagactttattttttagatcatagagagattcattatttgttcagatgcgttgacgctgtaaaagacgtcactattaccaaaaaaaataacattatcgtggcgccttatatagcacttttaactatcgcatcaaaaggatgcaaacttacagaaacaatgattgaagcattctttccagaactatataatgaacatagtaagaaatttaaattcaactctcaagtatccatcatccaagaaaaactcggataccagtttggaaactatcacgtttatgattttgaaccgtattactctacagtagctctggctattcgagatgaacattcatctggcatttttaatatccgtcaagagagttatctggtaagttcattatctgaaataacatatagattttatctaattaatctaaaatctgatcttgttcaatggagtgctagtacgggcgctgtaattaatcaaatggtaaatactgtattgattacagtgtatgaaaagttacaactggtcatagaaaatgattcacaatttacatgttcattggctgtggaatcaaaacttccaataaaattacttaaagatagaaatgaattatttacaaaattcattaacgagttaaaaaagaccagttcattcaagataagcaaacgcgataaggatacgctactaaaatattttacttaggactggagttagaatttatagacgactcatttcgtttatcattgttactattattactattactatcattattagtgttggcattattagtattcttcttgtcatcttgttcagaaatatacagcaatgctatacctaatactaaatacattatcatgctcgcaatggctctaacaacaacgaaccaaaatgaatttggtcgtagcttttgttcacaaaaatacataaagaaatgtctacataaatctatggcgccattggctacttgaaatagcgccagtcctcctacagattttaatatagctgtataacatgacatttattcatcatcaaaagagacagagtcaccatctgtcatatttagattttttttcatgtgttcaaagtatcctctactcatttcattataatagtttatcatacttagaattttaggacggatcaatgagtaagacttgactagatcgtcagtagtaatttgtgcatcgtctattctgcatccgcttcgtcgaataatgtatagcatcgctttgagattctccatagctatcaagtctttatacaatgacatggaaatatctgtgaatactttatacttctccaacatcgatgccttaacatcatcgcctactttagcattgaaaatacgttctattgtgtagatggatgtagcaagatttttaaacaacaatgccatcttacacgatgattgcctcaagtctccaatcgtttgtttagaacgattagctacagagtccaatgcttggctgactagcatattattatctttagaaattgtattcttcaatgaggcgtttatcatatctgtgatttcgttagtcatattacagtctgactgggttgtaatgttatccaacatatcacctatggatacggtacacgtaccagcatttgtaataatcctatctaagatgttgtatggcattgcgcagaaaatatcttctcctgtaatatctccactctcgataaatctactcagattattcttaaatgccttattctctggagaaaagatatcagtgtccatcatttcattaatagtatacgcagaaaagataccacgagtatcaattctatccaagatacttatcggttccgagtcacagataatggtttcctctccttcgggagatcctgcatagaaatatctaggacaatagtttctatactgtctgtaactctgataatctctaaagtcactaactgataccatgaaattgagaagatcaaacgctgaagtaattaatttttctgcctcgtttttactacaactagttttcatcaatgtagtgacgatgtattgtttagttacttttggtctaatactgatgatagagatattattgcttcccataatggatcttctagtagtcaccttaaagcccattgatgcgaatagcagatagataaagtcttggtatgactcctttctaatatagtacggactacctttgtcacccaactttatacccacataagccataacaacctctttaatagccgtttcatgaggtttatcagccatgagcctgagtagttggaagaatctcatgaatcccgtctcagaaagtcctatatgcatgatagatttatctttcctgggaaactctcgtatagtcatagatgaaatactctttaaagtttctgaaataagattagtaacagtcttacctccgactactctaggtaacaaacaaactctaataggtgttttctctgcggagataatatcagaaaggatagagcaataagtagtattattgtgattataaagaccgaatacataacaggtagaatttataaacatcatgtcctgaaggtttttagacttgtattcctcgtaatccataccgtcccaaaacatggatttggtaactttgatagccgtagatctttgttccttcgccaacaggttaaagaaattaataaagaatttgttgtttctatttatgtccacaaattgcacgtttggaagcgccacggttacattcactgcagcattttgaggatcgcgagtatgaagtacgatgttattgtttactggtatatctggaaagaaatctaccagtctaggaataagagattgatatcgcatagaaatagtaaagtttataatctcatcatcgaagagcattttgttaccattgtaataaatatccactctgtcatatgtataaatgaagtactgttcaaacatgatgagatgtttatatgttggcatagtagtgagatcgacgtttggtaatggcaatgtattaagattaactccataatgtctagcagcatctgcgatgttataagcgtcgtcaaagcggggtcgatcttgtattgttatatattgtctaacacctataagattatcaaaatcttgtctgcttaatacaccgttaacaatttttgccttgaattcttttattggtgcattaataacatccttatagaggatgttaaacaaataagtgttatcaaagttaagatctggatatttcttttctgctagaacatccattgagtcggagccatctggtttaatataaccaccgataaatctagctctgtattctgtatccgtcaatctaatattaagaaggtgttgagtgaaaggtggaagatcgtaaaagctgtgagtattaatgataggattagtttccgaactaatgttaattggggtattaataatatctatatttccagcgttaagtgtaacattaaacagttttaattcacgtgacgtggtatcaattaaataattaatgcccaatttggatatagcagcctgaagctcatcttgtttagttacggatcctaatgagttattaagcaatatatcgaacggatgaacgaaggttgttttaagttggtcacatactttgtaatctagacatagatgcggaagaacggtagaaactatacgaaataaatattcagagtcctctaattgatcaagagtaactattgacttaataggcatcatttatttagtattaaatgacgaccgtaccagtgacggatatacaaaacgatttaattacagagttttcagaagataattatccatctaacaaaaattatgaaataactcttcgtcaaatgtctattctaactcacgttaacaacgtggtagatagagaacataatgccgccgtagtgtcatctccagaggaaatatcctcacaacttaatgaagatctatttccagatgatgattcaccggccactattatcgaacgagtacaacctcatactactattattgacgatactccacctcctacgtttcgtagagagttattaatatcggaacaacgtcaacaacgagaaaaaagatttaatattacagtatcgaaaaatgctgaagcaataatggaatctagatctatgataacttctatgccaacacaaacaccatccttgggagtagtttatgataaagataaaagaattcagatgttagaggatgaagtggttaatcttagaaatcaacgatctaatacaaaatcatctgataatttagataattttaccaaaatactatttggtaagactccgtacaaatcaacagaagttaataagcgtatagccatcgttaattatgcaaatttgaacgggtcccccttatcagtcgaggacttggatgtttgttcggaggatgaaatagatagaatctataaaacgattaaacaatatcacgaaagtagaaaacgaaaaattatcgtcactaacgtgattattattgtcataaacattatcgagcaggcattgctaaaactcggatttgaagaaatcaaaggactgagtaccgatatcacttcagaaattatcgatgtggagatcggagatgactgcgatgctgtagcatctaaactaggaatcggtaacagtccggttcttaatattgtattgtttatactcaagatattcgttaaacgaattaaaattatttaatttaatacattcccatatccagacaacaatcgtctggattaatctgttcctgtcgtctcataccggacgacatattaatctttttattagtgggcatctttttagatggtttctttttcccagcattaactgagtcgatacctagaagatcgtgattgatctctccgaccattccacgaacttctaattggccgtctctgacggtaccataaactattttaccagcattagtaacagcttggacaatctgaccatccatcgcattgtacgatgtagtagtaactgttgttctacgtctaggagcaccagaagtatttttggagcccttggatgttgatgtagaagaagacgaggattttgattttggtttacatgtaatacattttgaactctttgattttgtatcacatgcgccggcagtcacatctgtttgagaattaagattattgttgcctcctttgacggctgcatctccaccgatttgcgctagtagatttttaagctgtggtgtaatcttattaactgtttcgatataatcatcgtaactgcttctaacggctaaattttttttatccgccatttagaagctaaaaatatttttatttatgcagaagatttaactagattatacaatgaactaatatgatccttttccagattatttacaaacttggtattttttggttctggaggaggcgaatttaaattcggacttggattcggattttgtaagttcttgatcttattatacatcgagtataggatggcgacagtaactgctacacaaataccgatcaaaagaagaataccaatcatttattgacaataacttcactattgatcaagtatgcaatatatcatcttttcactaaataagtagtaataatgattcaacaatgtcgagatatatggacgataataatttagttcatggaaatatcgctatgattggtgtgaatgactccgctaactctgtggggtgcgcagtgctttccccacatagaataaattagcattccgactgtgataataataccaagtataaacgccataatactcaatactttccatgtacgagtgggactggtagacttactaaagtcaataaaggcgaagatacacgaaagaatcaaaagaatgattccagcgattagcacgccggaaaaataatttccaatcataagcatcatgtccatttaactaataaaaattttaaatcgccgaatgaacaaagtggaatataaaccatataaaaacaatagtttgtactgcaaaaataatatctatttttgttttcgaagatatggtaaaattaaatagtagtacacagcatgttataactaacagcagcaacggctcgtaattacttatcatttactagacgaaaaggtggtgggatattttcttgctcaaataatacgaatatatcacccatccattttatgcgatgtttatatactctaatctttaatagatctatagacgacgggtttaccaacaatatagattttatcgattcatctaatttaaacccttccttaaacgtgaatgatctattatctggcataacgatgaccctacctgatgaatcggacaatgtactgggccatgtagaataaattatcaacgaattatcgtctacgaacatttatatcatttgttttaattttaggacgcgaataaatggatataaaatagaaaataacagatattacaaccagtgttatggccgcgcccaaccaggtaggcagttttattttatcttttactacaggttctcctggatgtacgtcaccaacggcggacgtagttctagtacaattagacgtaagttccgcttgggaattttttaacgctaaagagttaacgttaatcgtgcacccaacgtatttacatctagttcgttgaacatcttgattataatataaccattttctatctctagattcgtcagtgcactcatgtaaccaacataccctaggtcctaaatatttatctccggaattagattttggataattcgcgcaccaacaatttctatttcctttatgatcgttacaaaagacgtataatgccgtatccccaaaagtaaaataatcaggacgaataattctaataaactcagaacaatatctcgcatccatatgtttggagcaaatatcggaataagtagacatagccggtttccgttttgcacgtaaccattctaaacaattggggtttccaggatcgtttctacaaaatccagtcatgaaatcgtcacaatgttctgtcttgtaattattattaaatatttttggacagtgtttggtatttgtcttagaacaacattttgccacgctatcactatcgcccaggagataatccttttttataaaatgacatcgttgcccggatgctatataatcagtagcgtgttttaaatccttaatatattcaggagttacctcgttctgataatagattaatgatccaggacgaaatttgaaagaactacatggttctccatgaattaatacatattgtttagcaaattcaggaactataaaactactacaatgatctatcgacataccatctatcaaacaaaacttgggtttaatttctcccggagatgtttcataatagtacgtataactttcttctgcaaacttaacagctctattatattcaggataattaaaacctaattccatatatttgtctcgtatatctgctattcctggtgctattttgattctattaagagtaacagctgcccccattcttaataatcgtcagtatttaaactgttaaatgttggtatatcaacatctaccttatttcccgcagtataaggtttgttgcaggtatactgttcaggaatggttacatttatacttcttctatagtcctgtctttcgatgttcatcacatatgcaaagaacagaataaacaaaataatgtaagaaataatattaaatatctgtgaattcgtaaatacattgattgccataataattacagcagctacaatacacacaatagacattcccacagtgttgccattacctccacgatacatttgagttactaagcaataggtaataactaagctagtaagaggcaatagaaaagatgagataaatatcatcaatatagagattagaggagggctatatagagccaagacgaacaaaatcaaaccgagtaacgttctaacatcattatttttgaagattcccaaataatcattcattcctccataatcgttttgcatcatacctccatctttaggcataaacgattgctgctgttcctctgtaaataaatctttatcaagcactccagcacccgcagagaagtcgtcaagcatattgtaatatcttaaataactcatttatatattaaaaaatgtcactattaaagatggagtataatctttatgccgaactaaaaaaaatgacttgtggtcaacccctaagtctttttaacgaagacggggatttcgtagaagttgaaccgggatcatcctttaagtttctgatacctaagggattttacgcctctccttccgtaaagacgagtctagtattcgagacattaacaacgaccgataataaaatcactagtatcaatccaacaaatgcgccaaagttatatcctcttcaacgcaaagtcgtatctgaagtagtttctaatatgaggaaaatgatcgaatcaaaacgtcctctatacatcactcttcacttggcgtgtggatttggtaagactattaccacgtgttatcttatggctacacacggtagaaaaaccgtcatttgcgtacccaataaaatgttaatacatcaatggaagacacaggtagaggcagtcggattggaacataagatatccatagatggagtaagtagtctattaaaggaactaaagactcaaagtccggatgtattaatagtagtcagtagacatctgacaaacgatgccttttgtaaatatatcaataagcattatgatttgttcatcttggatgaatcacatacgtataatctgatgaacaatacagcagttacaagatttttagcgtattatcctccgatgatgtgttattttttaactgctacacctagaccatctaaccgaatttattgtaacagtattattaatattgccaagttatccaatctaaaaaaaactatctatgcagtagatagtttttttgagccatattccacagataatattagacatatggtaaaacgactagatggaccatctaataaatatcatatatataccgagaagttattatctgtagacgagcctagaaatcaacttattcttgataccctggtagaagaattcaagtcaggaactattaatcgcattttagttattactaaactacgtgaacatatggtattattctacaaacgattattagattttttcggaccagaggttgtatttataggagacgcccaaaatagacgtactccagatatggtcaaatcaatcaaggaactaaatagatttatattcgtatccaccttattttattccggtactggtttagatattcctagtttggattcgttgttcatttgctcggcagtaatcaacaatatgcaaatagagcaattactagggagggtatgtcgagaaacagaactattagataggacggtatatgtatttcctaacacatccatcaaagaaataaagtacatgataggaaatttcatgcaacgaattattagtctgtctgtagataaactaggatttaaacaaaaaagttatcggaaacatcaagaatccgatcccacttctgcatgtacaacatcatccagagaagaacgtgtattaaatagaatatttaactcgcaaaatcgttaagaagtttaagcgacgatccgcatgctgcgcaggccagtgtattacccctcatagtattaatataatccaatgatacttttgtgatgtcggaaatcttaaccaatttagactgacaggcagaacacgtcatgcaatcatcatcgtcatcgataactgtagtcttgggcttctttttgcgactcttcattccggaacgcacattggtgctatccatttaggtagtaaaaaataagtcagaatatgccctataacacgatcgtgcaaaacctggtatatcgtctctatctttatcacaatatagtgtatcgacatttttattattattgacctcgtttatcttggaacatggaatgggaacatttttgttatcaacggccatctttgccttaattccagatgttgtaaaattataactaaacagtctatcatcgacacaaatgaaattcttgtttagacgtttgtagtttacgtatgcggctcgttcgcgtctcattttttcagatattgcaggtactataatattaaaaataagaatgaaataacataggattaaaaataaagttatcatgacttctagcgctgatttaactaacttaaaagaattacttagtctgtacaaaagtttgagattttcagattctgcggctatagaaaagtataattctttggtagaatggggaacatctacttactggaaaataggcgtgcaaaaggtagctaatgtcgagacgtcaatatctgattattatgatgaggtaaaaaataaaccgtttaatattgatccgggctattacattttcttaccggtatattttgggagcgtctttatttattcgaagggtaaaaatatggtagaacttggatctggaaactcttttcaaataccagatgatatgcgaagtgcgtgtaacaaagtattagacagcgataacggaatagactttctgagatttgttttgttaaacaatagatggataatggaagatgctatatcaaaatatcagtctccagttaatatatttaaactagctagtgagtacggattaaacatacccaaatatttagaaattgaaatagaggaagacacattatttgacgacgagttatactctattatagaacgctctttcgatgataaatttccaaaaatatccatatcgtatattaagttgggagaacttagacggcaagttgtagactttttcaaattctcattcatgtatattgagtccatcaaggtagatcgtataggagataatatttttattcctagcgttataacaaaatcaggaaaaaagatattagtaaaagatgtagaccatttaatacgatccaaggttagagaacatacatttgtaaaagtaaaaaagaaaaacacattttccattttatacgactatgatggaaacggaacagaaactagaggagaagtaataaaacgaattatagacactataggacgagactattatgttaacggaaagtatttctctaaggttggtagtgcaggcttaaagcaattgactaataaattagatattaatgagtgcgcaactgtcgatgagttagttgatgagattaataaatccggaactgtaaaacgaaaaataaaaaaccaatcagcatttgatttaagcagagaatgtttgggatatccagaagcggattttataacgttagttaataacatgcggttcaaaatagaaaattgtaaggttgtaaatttcaatattgaaaatactaattgtttaaataacccgagtattgaaactatatatggaaactttaaccagttcgtctcaatctttaatgtcgtcaccgatgtcaaaaaaagattattcgagtgaaataatatgcgcctttgatataggtgcaaaaaatcctgccagaactgttttagaagtcaaggataactccgttagggtattggatatatcaaaattagactggagttctgattgggaaaggcgcatagctaaagatttgtcacaatatgaatacactacagttcttctagaacgtcagcctagaaggtcgccgtatgttaaatttatctattttattaaaggctttttatatcatacatcggctgccaaagttatttgcgtctcgcctgtcatgtctggtaattcatatagagatcgaaaaaagagatcggtcgaagcatttcttgattggatggacacattcggattgcgagactccgttccggatagacgcaaattagacgatgtagcggatagtttcaatttggctatgagatacgtattagataaatggaatactaattatacaccttataataggtgtaaatctagaaattacataaaaaaaatgtaataacgttagtaacgccattatggataatctatttacctttctacatgaaatagaagatagatatgccagaactatttttaactttcatctaataagttgcgatgaaataggagatatatatggtcttatgaaagaacgcatttcctcagaggatatgtttgataatatagtgtataataaagatatacatcctgccattaagaaactagtgtattgcgacatccaacttactaaacacattattaatcagaatacgtatccggtatttaacgattcttcacaagtgaaatgttgtcattatttcgacataaactcagataatagcaatattagctctcgtacagtagagatatttgagagggaaaagtcatctcttgtatcatatattaaaactaccaataagaagagaaaggtcaattacggcgaaataaagaaaactgttcatggaggcactaatgcaaattacttttccggtaaaaagtctgacgagtatctgagtactacagttagatccaacattaatcaaccttggatcaaaaccatctctaagaggatgagagttgatatcattaatcactctatagtaacgcgtggaaaaagctctatattacaaactatagaaattatttttactaatagaacatgtgtgaaaatattcaaggattctactatgcacattattctatccaaggacaaggatgaaaaggggtgtatacacatgattgacaaattattctatgtctattataatttatttctgttgttcgaagatatcatccaaaacgagtactttaaagaagtagctaatgttgtaaaccacgtactcacggctacggcattagatgagaaattattcctaattaagaaaatggctgaacacgatgtttatggagttagcaatttcaaaatagggatgtttaacctgacatttattaagtcgttggatcataccgttttcccctctctgttagatgaggatagcaaaataaagttttttaaggggaaaaagctcaatattgtagcattacgatctctggaggattgtataaattacgtgactaaatccgagaatatgatagaaatgatgaaggaaagatcgactattttaaatagcatagatatagaaacggaatcggtagatcgtctaaaagaattgcttctaaaatgaaaaaaaacactaattcagaaatggatcaacgactagggtataagtttttggtgcctgatcctaaagccggagttttttatagaccgttacatttccaatatgtatcgtattctaattttatattgcatcgattgcatgaaatcttgaccgtcaagcggccactcttatcgtttaagaataatacagaacgaattatgatagaaattagcaatgttaaagtgactcctccagattactcacctataatcgcgagtattaaaggtaagagttatgacgcattagccacgttcactgtaaatatctttaaagaggtaatgaccaaagagggtatatccatcactaaaataagtagttatgagggaaaagattctcatttgataaaaattccgctactaataggatacgggaataaaaatccacttgatacagccaagtatcttgttcctaatgtcataggtggagtctttatcaataaacaatctgtcgaaaaagtaggaattaatctagtagaaaagattacaacatggccaaaatttagggttgttaagccaaactcattcactttctcgttttcctccgtatcccctcctaatgtattaccgacaagatatcgccattacaagatatctctggatatatcacaattggaagcgttgaatatatcatcgacaaagacatttataacggtcaatattgttttgctgtctcaatatttatctagagtgagtctagaattcattagacgtagtttatcatacgatatgcctccagaagttgtctatctagtaaacgcgataatagatagtgctaaacgaattactgaatctattactgactttaatattgatacatacattaatgacctggtggaagctgaacacattaaacaaaaatctcagttaacgatcaacgagttcaaatatgaaatgctgcataactttttacctcatatgaactatacacccgatcaactaaagggattttatatgatatctttactaagaaagtttctctactgtatcttccacacttctagatatccagatagagattcgatggtttgtcatcgcatcctaacgtacggcaaatattttgagacgttggcacatgatgaattagagaattacataggcaacatccgaaacgatatcatgaacaatcacaagaacagaggcacttacgcggtaaacattcatgtactaacaactcccggacttaatcacgcgttttctagcttattgagtggaaagttcaaaaagtcagacggtagttatcgaacacatcctcactattcatggatgcagaatatttctattcctaggagtgttggattttatccggatcaagtaaagatttcaaagatgttttctgtcagaaaataccatccaagtcaatatctttacttttgttcatcagacgttccggaaagaggtcctcaggtaggtttagtatctcaattgtctgtcttgagttccattacaaatatactaacgtctgagtatttggatttggaaaagaaaatttgtgagtatatcagatcatattataaagatgatataagttactttgaaacaggatttccaatcactatagaaaatgctctagtcgcatctcttaatccaaatatgatatgtgattttgtaactgactttagacgtagaaaacggatgggattcttcggtaacttggaggtaggtattactttagttagggatcacatgaatgaaattcgcattaatattggagcgggaagattagtcagaccattcttggttgtggataacggagagctcatgatggatgtgtgtccggagttagaaagcagattagacgacatgacattctctgacattcagaaagagtttccgcatgtcatcgaaatggtagatatagaacaatttacttttagtaacgtatgtgaatcggttcaaaaatttagaatgatgtcaaaggatgaaagaaagcaatacgatttatgtgactttcctgccgaatttagagatggatatgtagcatcttcattagtgggaatcaatcacaattctggacccagagctattcttggatgtgctcaagctaaacaagctatctcttgtctgagctcggatatacgaaataaaatagacaatggaattcatttgatgtatccagagaggccaatcgtgattagtaaggctttagaaacttcaaagattgcggctaattgcttcggccaacatgttactatagcattaatgtcgtacaaaggtatcaatcaagaggatggaattatcatcaaaaaacaatttattcagagaggcggtctcgatattgttacagccaagaaacatcaagtagaaattccattggaaaactttaataacaaagaaagagataggtctaacgcctattcaaaattagaaagtaatggattagttagactgaatgctttcttggaatccggagacgctatggcacgaaatatctcatcaagaactcttgaagatgattttgctagagataatcagattagcttcgatgtttccgagaaatataccgatatgtacaaatctcgcgttgaacgagtacaagtagaacttactgacaaagttaaggtacgagtattaaccatgaaagaaagaagacccattctaggagacaaatttaccactagaacgagtcaaaagggaacagtcgcgtatgtcgcggatgaaacggaacttccatacgacgaaaatggtatcacaccagatgtcattattaattctacatccatcttctctagaaaaactatatctatgttgatagaagttattttaacagccgcatattctgctaagccgtacaacaataagggagaaaaccgacctgtctgttttcctagtagtaacgaaacatccatcgatacatatatgcaattcgctaaacaatgttatgagcattcaaatccgaaattgtccgatgaagaattatcggataaaatcttttgtgaaaagattctctatgatcctgaaacggataagccttatgcatccaaagtattttttggaccaatttattacttgcgtctgaggcatttaactcaggacaaggcaaccgttagatgtagaggtaaaaagacgaagctcattagacaggcgaatgagggacgaaaacgtggaggaggtatcaagttcggagaaatggagagagactgtttaatagcgcatggtgcagccaatactattacagaagttttgaaagattcggaagaagattatcaagatgtgtatgtttgtgaaaattgtggagacatagcagcacaaatcaagggtattaatacatgtcttagatgttcaaaacttaatctctctcctctcttaacaaaaattgataccacgcacgtatctaaagtatttcttactcaaatgaacgccagaggcgtaaaagtcaaattagatttcgaacgaaggcctccttcgttttataaaccattagataaagttgatctcaagccgtcttttctggtgtaatattctagtttggtagtagatacatatcaatatcatcaaattcgagatccgaattataaaatgggcgtggattgttaactatagaatcggacgtctgatattcgaaaatctgtggagtttcaggttttggtggaggtgtaactgctacttgggatactgaagtctgatattcagaaagctgtggatgttctggttcggcatccaccgatggtgtcacatcactaatcggttcggtaacgtctgtggatggaggtgctacttctacagaacctgtagcctcagttgtcaacggagatacatttttaatgcgagaaaatgtataatttggtaatggtttcttatgtggatctgaagaagaggtaagatatctactagaaagataccgatcacgttctagttctcttttgtagaacttaactttttctttctccgcatctagttgatattccaacctcttcacgttactacgttcagattccaattcacgttcgcatgggttacctccgcagtttttacgagcgatttcacgttcagccttcatgcgtctctccctctctctatcgagtttatcagagcagtctttctgaaggcgatcgaactccataaatttctccaacgctttgattgtttccatagatttccgaagttcagcttttaggactgtgattctttttctttcgaattcacagctggatgtacaaccgtttccattaccgccatctctaagtttcttttctagatcggcaacatttcatccccatgccttttacattcctcgagtctactgtcgtcgaaatatcgttccagctccttttcgacatcaataactttagcacgttgtctctcaagctctcttttgtagttatctgattccctggcacgtttaagatcttcatgcaattgagtcagctcttaacttcctctcttgcttcttcgtcatagtacgcgcaatcactgtgagatccattgttaccacgtctacactcggcgagctcgcgtttaagagattcaatttcccgtttgtattggtccatgtttccattgctaccaccattagatttacaggctgctagttgtcgttcgagatcagaaatacgggttttcttggaattgatttcgtcgatgtacttggcatcgaaacacttattaagttctttttccaattctacgattttatttctttcgcgagtcaattccctcctgtagtaactatctgttttgtcagattcacgctctctacgtagactttcttgcaagttactaatttgttccctagcacgtccgagtttagttttatatgctgaatagagttctgattcatcctttgagcagatctctagcgatcgtttaagattcctaattctagtctttagcctatttacctcctcagaagatgttccgttaccgttgcgtttacactcgttaagctgtctatcaagatccatgattctatctctaagacgttgcatctctctttccatatcagcattgctttcattattacgtctgcagtcactcaactgtctttcaatatctgagattctatctctaagacgtcgcatctctctctgtttcggcattggtttcattattacgtttacagtcgttcaactgtctttcaagatctgatattctagattggagtctgctaatctctgtagcattttcacggcattcactcagttgtctttcaagatctgaaattttagattggagtctgctaatctctgtaagatttcctcctccgctctcgatgcagtcggtcaacttattctctagttctctaatacgcgaacgcagtgcatcaacttcttgcgtgtcttcctggttgcgtgtacattcatcgagatctctaacgcgtcgtcgttcttcctcaagttctctgcgtactacagaaagcgtgtccctatcttgttgatatttagcaatttctgattctagagtactgattttgcttacgtagttactaatagttgtcttggccttatcaagatcctccttgtatttgtcgcattccttgatatccctacgaagtctggacagttcccattcgacattacgacgtttatcgatttcagctcggagatcgtcatcgcgttgttttagccacatacgactgagttcaagttctcgttgacaagatccatctacttttccattcctaatagtatccagttccttttctagttctgaacgcatttctcgttccctatcaagcgattctctcaattctcggatagtcttcttatcaatttctaataaatctgaaccatcatctgtcccattttgaatatccctgtgttctttgatctcttttgtaagtcggtcgattctttcggttttataaacagaatccctttccaaagtcctaatcttactgagtttatcactaagttctgcattcaattcggtgagttttctcttggcttcttccaactctgttttaaactctccactatttccgcattcttcctcgcatttatctaaccattcaattagtttattaataactagttggtaatcagcgattcctatagccgttcttgtaattgtgggaacataattaggatcttctaatggattgtatggcttgatagcatcatctttatcattattagggggatggacaaccttaattggttggtcctcatctcctccagtagcgtgtggttcttcaataccagtgttagtaataggcttaggcaaatgcttgtcgtacgcgggcacttcctcatccatcaagtatttataatcgggttctacttcagaatattcttttctaagagacgcgacttcgggagttagtagaagaactctgtttctgtatctatcaacgctggaatcaatactcaagttaaggatagcgaatacctcatcgtcatcatccgtatcttctgaaacaccatcatatgacatttcatgaagtctaacgtattgataaatagaatcagatttagtattaaacagatccttaacctttttagtaaacgcatatgtatattttagatctccagatttcataatatgatcacatgccttaaatgtcagtgcttccatgatataatctggaacactaatgggtgacgaaaaagatacagcaccatatgctacgttgataaataaatctgaaccactaagtagataatgattaatgttaagaaagaggaaatattcagtgtataggtatgtcttggcgtcatatcttgtactaaacacgctaaacagtttgttaatgtgatcaatttccaatagattaattagagcagcgggaataccaacaaacatattaccacatccgtattttctatgaatatcacatatcatgttaaaaaatcttgatagaagagcgaatatctcgtctgacttaatgagtcgtagttcagcagcaacataagtcataactgtaaatagaacatactttcctgtagtgttgattctagactccacatcaacaccattattaaaaatagttttatatacatctttaatctgctctccgttaatcgtcgaacgttctagtatacggaaacactttgatttcttatctgtagttaatgacttagtgatatcacgaagaatattacgaattacatttcttgtttttcttgagagacctgattcagaactcaactcatcgttccatagtttttctacctcagtggcgaaatctttggagtgcttggtacatttttcaataaggttcgtgacctccatttattataaaaaatttattcaaaacttaactacaatcgggtaattataagatcgtagatctcccatgtggcggaatactaccatctatcgcatgtggatggacagtaggtaatggccatgggaacagtaatgtttgcatatttatctttcttgctagtattactgcatattgtcccaatgtttcgatgtgatgttctaacctatcaactgccgctgtatcacaacaatagtgtccgatgaaattaagattatgatccaatgtgtttaatatatgattatcaagtcttatacgatccgcgtcttttttgacaggatcaggttcttctacaggaagaagtttcggcctcttatgatattcatgtctgggaaacggtggtctagggtgaggctccggtatcggagtgggttttggattataatcatcatcgtctatgacatcatcttcgacttcgatatttattttgctatcttgatgatgtcctgtatcagttgcattttcagcactcgactgaatattagcgcattcattgtctattattaccatatttctaaacccaaaatgtatgtgttgaacatcagtactatcgttgatgagtcttatagcatgaattcgcttatcgttatcgggtttatcttctgtcaccttagcaattccttttttattaaactctacataatcatatccatttctattgtttgttctaatataaacgagtatagcatcattgctaaatttttcaatagtatcaaaaacagaatatcctaaaccatataatatatattcaggaacactcaaactaaatgtccaggattctcctaaatacgtaaactttaatagtgcgaaatcattcaaaaatctaccacttatagatagatagtacataaatgcgtatagtagtctacctatctctttattatgaaaaccggcattacgatcatatatgtcgtgatatacctgtgatccgtttacgttaaaccataaatacatgggtgatcctataaacatgaatttatttctaattctcagagctatagttaattgaccgtgtaatatttgcttacatgcatacttgatacgcttattaataagatttttatcattgctcgttatttcagaatcgtatatataaggagtaccatcgtgattcttaccagatattatacaaaatactatatataaaatatattgacccacgttagtaatcatataaatgtttaacgttttaaattttgtattcaatgatccattatcatacgctatcatggtcttgtaatattcattctttaaaatataatattgtgttagccattgcattggagctcctaatggagattttctattctcatccattttaggataggctttcataaagtccctaataacttcgtgaataatgtttctatgttttctactgatgcatgtatttgcttcgatttttttatcccatgtttcatctatcatagatttaaacgcagtaatgctcgcaacattaacatcttgaaccgttggtacaattccgttccataaatttataatgttcgccatttatataactcattttttgaatatacttttaattaacaaaagagttaagttactcatatggacgccgtccagtctgaacatcaatctttttagccagagatatcatagccgctcttagagtttcagcgtgattttccaacctaaatagaacttcatcgttgcgtttacaacacttttctatttgttcaaactttgttgttacattagtaatctttttttccaaattagttagccgttgtttgagagtttcctcattgtcgtcttcatcggctttaacaattgcttcgcgtttagcctctggctttttagcagcctttgtagaaaaaaattcagttgctggaattgcaagatcgtcatctccggggaaaagagttccgtccatttaaagtacagattttagaaactgacactctgcgttatttatatttggtacaacacatggattataaatattgatgttaataacatcagaaaatgtaaagtctatacattgttgcatcgtgttaaattttctaatggatctagtattattgggtccaacttctgcctgaaatccaaatatggaagcggatacaaaaccgtttcctggataaaccacacatctccacttttgctttacatcagaaattgtgtcgttgacatcttgaactctcctatctaatgccggtgttccacctatagattttgaatattcgaatgctgcatgagtagcattaaattccttaatattgccataattttcatatattgagtaaccctggataaaaagtaaacacaccgcagccgtcgctaccacaataaaaaaaattgatagagagttcatttataatctattagaagctgacaaaatttttttacacgcatcagacaatgctttaataaatagttcaacatctacttttgtcatatcgaaccgatggtatgattctaacctagaattacatccgaaaaagttgactatgttcatagtcattaagtcattaacaaacaacattccagactctggattataagacgatactgtttcgtcacaattacctaccttaatcatgtgattatgaatattggctattagagcaccttctaagaaatctataatatctttgaaacacgatttaaaatcaaaccacgaatatacttctacgaagaaagttagtttacccataggagaaataactataaatggagatctaaatacaaaatccggatctatgatagttttaacattattatattctctattaaatacctccacatctaaaaatgttaattttgaaactatgtcttcgtttattaccgtacctgaactaaacgctataagctctattgtttgagaactctttaaacgatattcttgaaatacatgtaacaaagtttcctttaactcggtcggtttatctaccatagttacagaatttgtatccttatctataatataataatcaaaatcgtataaagttatataattatcgcgttcagattgtgatcttttcaaatagactaaaaaccccatttctctagtaagtatcttatgtatatgtttgtaaaatatcttcatggtgggaatatgctctaccgcagttagccattcctcattgacagcggtagatgtattagacaaaactattccaatgtttaacaagggccattttacgagattattaaatccttgtttgataaatgtagccaatgagggttcgagttcaacgacgattgaattctcttcccgcggatgctgcatgatgaacgacgggatgttgttcgattgatttggaattctttttcgactttttgtttatattaaatattttaaaatttatagcggatagcaattcatgtaccacggataatgtagacgcgtattgcgcatcgatatctttattattagataaatttatcaataaatgtgagaagtttgcctcgttaaggtcttccatttaaatattatataaacatttgtgtttgtatcttattcgtcttttatggaatagttttttactagtaaagctgcaattacacactttgtccgtaaaacataaatataaacaccagcttttatcaatcgttccaaaaagtcgacggcggacatttttaacatggcatctattttaaatacacttaggtttttggaaaaaacatcattttataattgtaacgattcaataactaaagaaaagattaagattaaacataagggaatgtcatttgtattttataagccaaagcattctaccgttgttaaatacttgtctggaggaggtatatatcatgatgatttggttgtattggggaaggtaacaattaataatctaaagatgatgctattttacatggatttatcatatcatggagtgacaagtagtggagcaatttacaaattgggatcgtctatcgatagactttctctaaataggactattgttacaaaagttaataattatgatgatacattttttgacgacgatgattgatcgctattgcacaattttgtttttgtactttctaatatagtgtttaggttctttttcatatgagaatattgatttactaaaatatctatgtttaacttttgttctatgacgtccttatcggcggtatcggtacatatacgtaattcaccttcacaaaatacggagtcttcgataataatagccaatcgattattggatctagctgtctgtatcatattcaacatgtttaatatatcctttcgtttcccctttacaggcatcgatcgtagcatattttccgcgtctgatatggaaatgttaaaactacaaaaatgcgtaatgttagcccgtcctaatattggtacgtgtctataagtttggcatagtagaataatagacgtgtttaaatgccttccaaagtttaagaattctattagagtattgcattttgatagtttatcgcctacatcatcaaaaataagtaaaaagtgtgctgattttttatgattttgtgcgacagcaatacatttttctatgttacttttagttcgtatcagattatattctagagattcctgactactaacgaaattaatatgatttggccaaatgtatccatcataatctgggttataaacgggtgtaaacaagaatatatgtttatattttttaactagtgtagaaaacagagatagtaaatagatagtttttccagatccagatcctcctgttaaaaccattctaaacggcatttttaataaattttctcttgaaaattgtttttcttggaaacaattcataattatatttacagttactaaattaatttgataataaatcaaaatatggaaaactaaggttgttagtagggaggagaacaaagaaggcacatcgtgatataaataacatttattatcatgatgacaccagaaaacgacgaagagcagacatctgtgttctccgctactgtttacggagacaaaattcagggaaagaataaacgcaaacgcgtgattggtctatgtattagaatatctatggttatttcactactatctatgattaccatgtccgcgtttctcatagtgcgcctaaatcaatgcatgtctgctaacgaggctgctattactgacgccgctgttgccgttgctgctgcatcatctactcatagaaaggttgcgtctagcactacacaatatgatcacaaagaaagctgtaatggtttatattaccagggttcttgttatatattacattcagactaccagttattctcggatgctaaagcaaattgcactgcggaatcatcaacactacccaataaatccgatgtcttgactacctggctcattgattatgttgaggatacatggggatctgatggtaatccaattacaaaaactacatccgattatcaagattctgatgtatcacaagaagttagaaagtatttttgtgttaaaacaatgaactaatatttatttttgtacattaataaatgaaatcgcttaatagacaaactgtaagtaggtttaagaagttgtcggtgccggccgctataatgatgatactctcaaccattattagtggcataggaacatttctgcattacaaagaagaactgatgcctagtgcttgcgccaatggatggatacaatacgataaacattgttatttagatactaacattaaaatgtctacagataatgcggtttatcagtgtcgtaaattacgagctagattgcctagacctgatactagacatctgagagtattgtttagtattttttataaagattattgggtaagtttaaaaaagaccaatgataaatggttagatattaataatgataaagatatagatattagtaaattaacaaattttaaacaactaaacagtacgacggatgctgaagcgtgttatatatacaagtctggaaaactggttaaaacagtatgtaaaagtactcaatctgtactatgtgttaaaaaattctacaagtgacaacaaaaaatgaattaataataagtcgttaacgtacgccgccatggacgccgcgtttgttattactccaatgggtgtgttgactataacagatacattgtatgatgatctcgatatctcaatcatggactttataggaccatacattataggtaacataaaaactgtccaaatagatgtacgggatataaaatattccgacatgcaaaaatgctactttagctataagggtaaaatagttcctcaggattctaatgatttggctagattcaacatttatagcatttgtgccgcatacagatcaaaaaataccatcatcatagcatgcgactatgatatcatgttagatatagaagataaacatcagccattttatctattcccatctattgatgtttttaacgctacaatcatagaagcgtataacctgtatacagctggagattatcatctaatcatcaatccttcagataatctgaaaatgaaattgtcgtttaattcttcattctgcatatcagacggcaatggatggatcataattgatgggaaatgcaatagtaattttttatcataaaagttgtaaagtaaataataaaacaataaatattgaactagtagtacgtatattgagcaatcagaaatgatgctggtacctcttatcacggtgaccgtagttgcgggaacaatattagtatgttatatattatatatttgtaggaaaaagatacgtactgtctataatgacaataaaattatcatgacaaaattaaaaaagataaagagttctaattccagcaaatctagtaaatcaactgatagcgaatcagactgggaggatcactgtagtgctatggaacaaaacaatgacgtagataatatttctaggaatgagatattggacgatgatagcttcgctggtagtttaatatgggataacgaatccaatgttatggcgcctagcacagaacacatttacgatagtgttgctggaagcacgctgctaataaataatgatcgtaatgaacagactatttatcagaacactacagtagtaattaatgaaacggagactgttgaagtacttaatgaagataccaaacagaatcctaactattcatccaatcctttcgtaaattataataaaaccagtatttgtagcaagtcaaatccgtttattacagaacttaacaataaatttagtgagaataatccgtttagacgagcacatagcgatgattatcttaataagcaagaacaagatcatgaacacgatgatatagaatcatcggtcgtatcattggtgtgattagtttcctttttataaaattgaagtaatatttagtattattgctgccgtcacgttgtacaaatggagatattccctgtattcggcatttctaaaattagcaattttattgctaataatgactgtagatattatatagatacagaacatcaaaaaattatatctgatgagatcaatagacagatggatgaaacggtacttcttaccaacatcttaagcgtagaagttgtaaatgacaatgagatgtaccatcttattcctcatagattatcgacgattatactctgtattagttctgtcggaggatgtgttatctctatagataatgacatcaatggcaaaaatattctaacctttcccattgatcatgctgtaatcatatccccactgagtaaatgtgtcgtagttagcaagggtcctacaaccatattggttgttaaagcggatatacctagcaaacgattggtaacatcgtttacaaacgacatactatatgtaaacaatctgtcactgattaattatttgccgttgtctgtattcattattagacgagtcaccgactatttggatagacacatatgcgatcagatatttgctaataataagtggtattcccttataaccatcgacgataagcaatatcctattccatcaaactgtataggtatgtcctctgccaagtacataaattctagcatcgagcaagatactttaatccatgtttgtaacctcgagcatccgttcgactcagtatacaaaaaaatgcagtcgtacaattctctacctatcaaggaacaaatattgtacggtagaattgataatataaatatgagcattagtatttctgtggattaatagatttctagtatggggatcattaatcatctctaatctctaaatacctcataaaacgaaaaaaaagctattatcaaatactgtacggaatggattcattctcttctctttttatgaaactctgttgtatatctactgataaaactggaagcaaaaaatctgatagaaagaataagaataagatcaaggattatatggaacacgattattataaaataacaatagttcctggttcctcttccacgtctactagctcgtggtattatacacatgcctagtaatagtctctttgcgttgacggaaagcagactagaaataacaggctaaaatgttcagacaccataatagttcccaacccagataataacagagttccatcaacacattcctttaaactcaatcccaaacccaaaaccgttaaaatgtatccggccaattgatagtagataatgaggtgtacagcgcatgataatttacacagtaaccaaaatgaaaatactttagtaattataagaaatatagacggtaatgtcatcatcaacaatccgataatatgcctgagagtaaacattgacggataaaacaaaaatgctccgcataactctatcatggcaataacacaaccaaatacttgtaagattcctaaattagtagaaaatacaacgaatatcgatgtataagtgatctcgagaaataataagaataaagtaatgcccgtaaagataaacatcaacattgtttggtaatcattaaaccaattagtatgaagttgaactaatttcacagtagattttattccagtgttatcctcgcatgtataagtacctggtaagatatctttatattccataatcaatgagacatcactatctgataacgaatgaagtctagcactagtatgccatttacttaatattgtcgtcttggaagttttattataagttaaaatatcatggttatccaatttccatctaatatactttgtcggattatctatagtacacggaataatgatggtatcattacatgctgtatactctatggtctttgtagttgttataacaaccaacgtatagaggtatatcaacgatattctaactcttgacattttttatttatttaaaatgatacctttgttatttattttattctattttgctaacggtattgaatggcataagtttgaaacgagtgaagaaataatttctacttacttattagacgacgtattatacacgggtgttaatggggcggtatacacattttcaaataataaactaaacaaaactggtttaactaataataattatataacaacatctataaaagtagaggatgcggataaggatacattagtatgcggaaccaataacggaaatcccaaatgttggaaaatagacggttcagacgacccaaaacatagaggtagaggatacgctccttatcaaaatagcaaagtaacgataatcagtcacaacggatgtgtactatctgacataaacatatcaaaagaaggaattaaacgatggagaagatttgacggaccatgtggttatgatttattcacggcggataacgtaattccaaaagatggtttacgaggagcattcgtcgataaagacggtacttatgacaaagtttacattcttttcactgatactatcggctcaaagagaattgtcaaaattccgtatatagcacaaatgtgcctaaacgacgaaggtggtccatcatcattgtctagtcatagatggtcgacgtttctcaaagtcgaattagaatgtgatatcgacggaagaagttatagacaaattattcattctagaactataaaaacagataatgatacgatactatatgtattcttcgatagtccttattccaagtccgcattatgtacctattctatgaataccattaaacaatctttttctacgtcaaaattggaaggatatacaaagcaattgccgtctccagctcctggtatatgtttaccagctggaaaagttgttccacataccacgtttgaagtcatagaacaatataatgtactagatgatattataaagcctttatctaaccaacctatcttcgaaggaccgtctggtgttaaatggttcgatataaaggagaaggaaaatgaacatcgggaatatagaatatacttcataaaagaaaattctatatattcgttcgatacaaaatctaaacaaactcgtagctcgcaagtcgatgcgcgactattttcagtaatggtaactgcgaaaccgttatttatagcagatatagggataggagtaggaatgccacaaatgaaaaaaatacttaaaatgtaatcttaatcgagtacaccacacgacaatgaacaaacataagacagattatgctggttatgcttgctgcgtaatatgcggtctaattgtcggaattatttttacagcgacactattaaaagttgtagaacgtaaattagttcatacaccattaatagataaaacgataaaagatgcatatattagagaagattgtcctactgactggataagctataataataaatgtatccatttatctactgatcgaaaaacctgggaggaaggacgtaatgcatgcaaagctctaaattcaaattcggatctaattaagatagagactccaaacgagttaagttttttaagaagccttagacgaggctattgggtaggagaatccgaaatattaaaccagacaaccccatataattttatagctaagaatgccacgaagaatggaactaaaaaacggaaatatatttgtagcacaacgaatactcccaaactgcattcgtgttacactatataacaattacactacatttttatcataccactacttcggttagatgttttagaaaaaaataaatatcgccgtaccgttcttgtttttataaaaataacaattaacaattatcaaattttttctttaatattttacgtggttgaccattcttggtggtaaaataatctcttagtgttggaatggaatgctgtttaatgtttccacactcatcgtatattttgacgtatgtagtcacatcgtttacgcaatagtcagactgtagttctatcatgcttcctacatcagaaggaggaacagttttaaagtctcttggttttaatctattaccgttagttttcatgaaatcctttgttttatccacttcacattttaaataaatgtccactatacattcttttgttaattttactagatcgtcatgggtcatagaatttataggttccgtagtccatggatccaaactagcaaacttcgcgtatacggtatcgcgattagtgtatacaccaactgtatgaaaattaagaaaacagtttaataaatcaacagaaatatttaatcctccgtttgatacagatgcgccatatttatggatttcggattcacacgttgtttgtctgaggtgttcgtctagtgttgcttctacgtaaacttcgattcccatatattctttattgtcagaatcgcataccgatttatcatcatacactgtttgaaaactaaatggtatacacatcaaaataataaataataacgagtacattctgcaatattgttatcgtaattggaaaaatagtgttcgagtgagttggattatgtgagtattggattgtatattttattttatattttgtaataagaataaaatgctaatgtcaagtttattccaatagatgtcttattaaaaacatatataataaataacaatggctgaatggcataaaattatcgaggatatctcaaaaaataataagttcgaggatgccgccatcgttgattacaagactacaaagaatgttctagctgctattcctaacagaacatttgccaagattaatccgggtgaaattattcctctcatcactaatcgtaatattctaaaacctcttattggtcagaaatattgtattgtatatactaactctctaatggatgagaacacgtatgctatggagttgcttactgggtacgcccctgtatctccgatcgttatagcgagaactcataccgcacttatatttttgatgggtaagccaacaacatccagacgtgacgtgtatagaacgtgtagagatcacgctacccgtgtacgtgcaactggtaattaaaataaaaagtaatattcatatgtagtgtcaattttaaatgatgatgatgaaatggataatatccatattgacgatgtcaataatgccggtattggcatacagttcatcgatttttagatttcattcagaggatgtggaattatgttatgggcatttgtattttgataggatctataatgtagtaaatataaaatataatccgcatattccatatagatataattttattaatcgcacgttaaccgtagatgaactagacgataatgtcttttttacacatggttattttttaaaacacaaatatggttcacttaatcctagtttgattgtctcattatcaggaaacttaaaatataatgatatacaatgctcagtaaatgtatcgtgtctcattaaaaatttggcaacgagtacatctactatattaacatctaaacataagacttattctctacatcggtccacgtgtattactataataggatacgattctattatatggtataaagatataaatgacaagtataatgacatctatgattttactgcaatatgtatgctaatagcgtctacattgatagtgaccatatacgtgtttaaaaaaataaaaatgaactcttaattatgctatgctattagaaatggataaaatcaaaattacggttgattcaaaaattggtaatgttgttaccatatcgtataacttggaaaagataactattgatgtcacacctaaaaagaaaaaagaaaaggatgtattattagcgcaatcagttgctgtcgaagaggcaaaagatgtcaaggtagaagaaaaaaatattatcgatattgaagatgacgatgatatggatgtagaaagcgcgtaatacgatctataaaaataagtatataaatactttttatttactgtactcttactgtgtagtggtgataccctactcgattatttttttaaaaaaaaaatacttattctgattcttctagccatttccgtgttcgtttgaatgccacatcgacgtcaaagataggggagtagttgaaatctagttctgcattgttggtacgcacctcaaatgtagtgttggatatcttcaacgtatagttgttgagtagtgatggttttctaaatagaattctcttcatatcattcttgcacgcgtacatttttagcatccatcttggaatcctagatccttgttctattcccaatggtttcatcaatagaagattaaacatatcgtacgaacacgatggagagtaatcgtagcaaaagtaagcatttcctttaatcttagatcccggatactggatatattttgcagccaacacgtgcatccatgcagcatttcctacatatacccggctatgcaccgcgtcatcatcgactgtacgatacataatgttaccgtgttgcttacattgctcgtaaaagactttcatcaatttgtctccttctccgtaaattccagtgggtcttaggcaacaagtatacaattttgctccattcatgattacggaattattggctttcataaccagttgctcggccatacgtttactttttgcgtatacatgtcctggtgatatatcataaagggtatgctcatggccgatgaatggatcaccgtgtttattgggtcctattgcttccatgctactagtatagatcaaatacttgattcctaggtccacacaagctgccaaaatagtctgtgttccataatagtttactttcatgatttcattatcggtgtattttccaaatacatccactagagcagccgtatgaataatcagatttaccccatctagcgcttctctcaccttatcaaagtcgtttatatcacattgtatatagtttataaccttaactttcgaggttattggttgtggatcttctacaatatctatgactctgatttcttgaacatcatctgcactaattaacagttttactatatacctgcctagaaatccggcaccaccagtaaccgcgtacacggccattgctgccactcataatatcagactacttattctattttactaaataatggctgtttgtataatagaccacgataatatcagaggagttatttactttgaaccagtccatggaaaagataaagttttaggatcagttattggattaaaatccggaacgtatagtttgataattcatcgttacggagatattagtcaaggatgtgattccataggcagtccagaaatatttatcggtaacatctttgtaaacagatatggtgtagcatatgtttatttagatacagatgtaaatatatttacaattattggaaaggcgttatctatttcaaaaaatgatcagagattagcgtgtggagttattggtatttcttacataaatgaaaagataatacattttcttacaattaacgagaatggcgtttgatatatcagttaatgcgtctaaaacaataaatgcattagtttacttttctactcagcaaaataaattagtcatacgtaatgaagttaatgatacacactacactgtcgaatttgatagggacaaagtagttgacacgtttatttcatataatagacataatgacaccatagagataagaggggtgcttccagaggaaactaatattggttgcgcggttagtatgacttacttgtataataagtatagttttaaactgattttagcagaatatataagacacagaaatactatatccggcaatatttattcggcattgatgacactagatgatttggctattaaacagtatggagacattgatctattatttaatgagaaacttaaagtagactccgattcgggactatttgactttgtcaactttgtaaaggatatgatatgttgtgattctagaatagtagtagctctatctagtctagtatctaaacattgggaattgacaaataaaaaatataggtgtatggcattagccgaacatatatctgatagtattccaatatctgagctatctagactacgatacaatctatgtaagtatctacgcggacacactgagagcatagaggataaatttgattattttgaagacgatgattcgtctacatgttctgccgtaaccgacagggaaacggatgtataattttttttatagcgtgaaggatatgataaaaaatataattgttgtatttatcccattccaatcaccttatatgattctgtaacacaataaaggagtcttatagatgtatagaggtcagatactggtttgataaactgtttattccacataagtatgtttgactttatggttagacccgcatactttaacaaatcactgaaaattggagttaggtattgacctctcagaatcagttgccgttctggaacattaaatgtattttttatgatatactccaacgcatttatgtgggcatacaacaagtcattactaatggaatattccaagagttttagttgtctagtatttaacaagagaagagatttcaacagactgtttatgaactcgaatgccgcctcattgtcgcttatattgatgatgtcgaattctcccaatatcatcaccgatgagtagctcatcttgttatcgggatccaagttttctaaagatgtcattaaaccctcgatcatgaatggatttatcatcatcgtttttatgttggacatgagcttagtccgtttgtccacatctatagaagatgatttctgaattatttcatatatctctctctttaactccaggaacttgtcaggatggtctactttaatatgttctcgtctaagagatgaaaatctttggatggttgcacgcgacttttctctaaaggatgacgttgcccaagatcctctcttaaatgaatccatcttatccttggacaagatggacagtctattttccttagatggtttaatatttttgttacccatgatctataaaggtagacctaatcgtctcggatgaccatatatttattttcagttttattatacgcataaattgtaaaaaatatgttaggtttacgaaaatgtctcgtggggcattaatcgtttttgaaggattggacaaatctggaaaaacaacacaatgtatgaacatcatggaatcaataccttcaaacacaataaaataccttaactttcctcagagatccactgtcactggaaagatgatagatgactatctaactcgtaaaaaaacctataatgatcatatagttaatctattattttgtgcaaatagatgggagtttgcatcttttatacaagaacaactagaacagggaattactttaatagttgatagatacgcattttctggagtagcgtatgccgccgctaaaggcgcgtcaatgactctcagtaagagttatgaatctggattgcctaaacccgacttagttatattcttggaatctggtagcaaagaaattaatagaaacgtcggtgaggaaatttatgaagatgttacattccaacaaaaggtattacaagaatataaaaaaatgattgaagaaggagatattcattggcaaattatttcttctgaattcgaggaagatgtaaagaaggagttgattaagaatatagttatagaggctatacacacggttactggaccagtggggcaactgtggatgtaatagtgaaattacattttttataaatagatgttagtacagtgttataaatggatgaagcatattactctggcaacttggaatcagtactcggatacgtgtccgatatgcataccgaactcgcatcaatatctcaattagttattgccaagatagaaactatagataatgatatattaaacaaggacattgtaaattttatcatgtgtagatcaaacttggataatccatttatctctttcctagatactgtatatactattatagatcaagagaactatcagactgagttgattaattcattagacgacaatgaaattatcgattgtatagttaataagtttatgagcttttataaggataacctagaaaatatagtagatgctatcattactctaaaatatataatgaataatccagattttaaaactacgtatgccgaagtactcggttccagaatagccgatatagatattaaacaagtgatacgtaagaatatactacaattgtctaataatatccgcgaacgatatttgtgaaaatattaaaaaaaaatactttttttattaaatgacgtcttttcgtgaatttagaaaattatgctgtgctatatatcacgcatcaggatataaagaaaaatctaaattaattagagactttataacagatagggatgataaatatttgatcattaagctattgcttcccggattagacgatagaatttataacatgaacgataaacaaattataaaattatatagtataatatttaaacaatctcaggaagatatgctacaagatttaggatacggatatataggagacactattaggactttcttcaaagagaacacagaaatccgtccacgagataaaagcattttaactttagaagaagtggatagttttttaactacgttatcatccgtaactaaagaatcgcatcaaataaaattattgactgatgtagcatctgtttgtacatgtaatgatttaaaatgtgtagtcatgcttattgataaagatctaaaaattaaagcgggtcctcggtacgtacttaacgctattagtcctaatgcctatgatgtgtttagaaaatctaataacttgaaagagataatagaaaattcatctaaacaaaatctagactctatatctatttctgttatgactccaattaatcccatgttagcggaatcgtgtgattctgtcaataaggcgtttaaaaaatttccatcaggaatgtttgcggaagtcaaatacgatggtgaaagagtacaagttcataaaaataataacgagtttgccttctttagtagaaacatgaaaccagtactctctcataaagtggattatctcaaagaatacataccgaaagcatttaaaaaagctacgtctatcgtattggattctgaaattgttcttgtagacgaacataatgtaccgctcccgtttggaagtttaggtatacacaaaaagaaagaatataaaaactctaacatgtgtttgttcgtgtttgactgtttgtactttgatggattcgatatgacggacattccattgtacgaacgaagatcttttctcaaagatgttatggttgaaatacccaatagaatagtattctcagagttgacgaatattagtaacgagtctcagttaactgacgtattggatgatgcactaacgagaaaattagaaggattggtcttaaaagatattaatggagtatacgaaccgggaaagagaagatggttaaaaataaagcgagactatttgaacgagggttccatggcagattctgccgatttagtagtactaggtgcctactatggtaaaggagcaaagggtggtatcatggcagtctttctaatgggttgttacgacgatgaatccggtaaatggaagacggttaccaagtgttcaggacacgatgataatacgttaagggagttgcaagaccaattaaagatgattaaaattaacaaggatcccaaaaaaattccagagtggttagtagttaataaaatctatattcccgattttgtagtagaggatccgaaacaatctcagatatgggaaatttcaggagcagagtttacatcttccaagtcccataccgcaaatggaatatccattagatttcctagatttactaggataagagaggataaaacgtggaaagaatctactcatctaaacgatttagtaaacttgactaaatcttaatagttacatacaaactgaaaattaaaataacactatttagttggtggtcgccatggatggtgttattgtatactgtctaaacgcgctagtaaaacatggcgaggaaataaatcatataaaaaatgatttcatgattaaaccatgttgtgaaagagtttgtgaaaaagtcaagaacgttcacattggcggacaatctaaaaacaatacagtgattgcagatttgccatatatggataatgcggtatccgatgtatgcaattcactgtataaaaagaatgtatcaagaatatccagatttgctaatttgataaagatagatgacgatgacaagactcctactggtgtatataattattttaaacctaaagatgccattcctgttatcatatctataggaaaggataaagatgtctgtgaactattaatctcatcagacatatcgtgtgcatgcgtggagttaaattcatatcacgtagccattcttcccatggatgtttccttttttaccaaaggaaatgcatcattgattattctcctgtttgatttctctatcgatgcggcacctctcttaagaagtgtaaccgataataatgttattatatctagacaccagcgtctacatgacgagcttccgagttccaattggttcaagttttacataagtataaagtccgactattgttctatattatatatggttgttgatggatctgtgatgcatgcgatagctgataatagaactcacgcaattattagcaaaaatatattagacaatactacgattaacgatgagtgtagatgctgttattttgaaccacagattaggattcttgatagagatgagatgctcaatggatcatcgtgtgatatgaacagacattgtattatgatgaatttacctgatgtaggcgaatttggatctagtatgttggggaaatatgaacctgacatgattaagattgctctttcggtggctggtaatttaataagaaatcgagactacattcccgggagacgaggatatagctactacgtttacggtatagcctctagataatttttttaagcacgaaataaaaaacataattttaaaccaatctatttcatactattttgtgtgatcaccatggacataaagatagatattagtatttctggtgataaatttacggtgactactaggagggaaaatgaagaaagaaaaaaatatctacctctccaaaaagaaaaaactactgatgttatcaaacctgattatcttgagtacgatgacttgttagatagagatgagatgtttactattctagaggaatattttatgtacagaggtctattaggcctcagaataaaatatggacgactctttaacgaaattaaaaaattcgacaatgatgcggaagaacaattcggtactatagaagaactcaagcagaaacttagattaaattctgaagagggagcagataactttatagattatataaaggtacaaaaacaggatatcgtcaaacttactgtatacgattgcatatctatgataggattgtgtgcatgcgtggtagatgtttggagaaatgagaaactgttttctagatggaaatattgtttacgagcgattaaactgtttattgatgatcacatgcttgataagataaaatctatactgcagaatagactagtatatgtggaaatgtcatagaaagttaaaagttaatgagagcaaaaatatataaggttgtattccatatttgttatttttttctgtaatagttagaaaaatacattcgatggtctatctatcagattattatgtgttataaggtactttttctcataataaactagagtatgagtaagatagtgtttttcaaaacatataaatctaaaattgatggatgagatatacagctattaatttcgaaaatatattttaatctgataactttaaacatggatttttaatggtggtttaacgttttaaaaaaagattttgttattgtagtatatgataatattaaaagatggatataaagaatttgctgactgcatgtactattttttacattactacattggctacggcagatatacctacttcgtcactgccacacgctccggtaaacggggcatgtgacgagggagaatatcttgataagaggcataatcaatgttgtaatcagtgtccacctggagaatttgccaaggttagatgtaatggtaacgataacacaaaatgtgaacgctgcccacctcatacatataccgcaatccccaattactctaatggatgtcatcaatgtagaaaatgcccaacaggatcatttgataaggtaaagtgtaccggaacacagaacagtaaatgttcgtgtcttcctggttggtattgcgctactgattcttcacagactgaagattgtcgagattgtataccaaaaaggagatgtccatgcggatactttggtggaatagatgaacaaggaaatcctatttgtaaatcgtgttgtgttggtgaatattgcgactacctacgtaattatagacttgatccatttcctccatgcaaactatctaaatgtaattaattatgattttgatgataatgttaccatacattatatcgctacttggttagtgtattattcagtatgaagacctattaataattacttatcttttgacgatcttgttataattataatataaaaatacttatggcatagtaactcataattgctgacgcgataaattcgtaataatctgttttgttcaaatttttataaggaatctacaggcataaaaataaaaatataatttataatatactcttacagcgcgccatcatgaataacagcagtgaattgattgctgttattaatggatttagaaatagtggacgattttgtgatattaatatagttattaatgatgaaaggataaacgctcacagactcatcctatctggagcctccgaatatttttccattctgttttccaataattttatcgattctaatgaatacgaagttaatctaagtcatttagattatcaaagtgttaacgatttgatcgattacatttatgggatacctttgagcctaactaacgataacgtgaaatatattctttcaaccgctgattttttacaaattggatctgctattacggagtgtgaaaattacatacttaaaaatctttgttctagaaactgtatcgatttctacatatacgctgataaatataataacaagaaaatagaatcagcgtcgtttaacacaatattacaaaatattttgagactcatcaacgatgaaaactttaaatacttaacagaggaatcaatgataaaaattttaagcgatgatatgttaaatataaaaaatgaggatttcgccccactaattctcattaaatggttagagagtactcaacaaccatgcaccgtcgagttacttaaatgcctcagaatatcattgctttccccacaagttataaaatcactttatagtcatcgactggttagttcaatctacgaatgtataacattcttaaacaatatagcattcttggatgaatcatttcctagataccatagcatcgagttgatatctatcggtataagtaattcgcatgataagatttccataaactgctacaatcataaaaaaaatacatgggaaatgatatcttcacgtagatataggtgtagtttcgcagtggccgtcctggataatattatctatatgatgggtggatatgatcagtccccgtatagaagttcaaaggttatagcgtacaatacatgtacaaattcttggatatatgatataccagagctaaaatatcctcgttctaattgtgggggactggctgatgacgaatacatttattgtataggcggcatacgcgatcaggattcatcgttgacatctagtattgatagatggaagccatcaaaaccatattggcagaagtatgctaaaatgcgcgaaccaaaatgtgatatgggggttgcgatgttaaacggattaatatatgttataggtggaatcgttaaaggtgacacgtgtaccgacgcactagagagtttatcagaagatggatggatgaagcatcaacgtcttccaataaaaatgtccaatatgtcgacgattgttcatgatggcaagatttatatatctggaggttacaacaatagtagtgtagttaatgtaatatcgaatctagtccttagctataattcgatatatgatgaatggaccaaattatcatcattaaacattcctagaattaatcccgctctatggtcagcgcataataaattatatgtaggaggaggaatatctgatgatgttcgaactaatacatctgagacatacgacaaagaaaaagattgttggacattggataatggtcacgtgttaccacgcaattatataatgtataaatgcgaaccgattaaacataaatatccattggaaaaaacacagtacacgaatgattttctaaagtatttggaaagttttataggtagttgatagaacaaaatacataattttgtaaaaataaatcactttttatactaatatgacacgattaccaatacttttgttactaatatcattagtatacgctacaccttttcctcagacatctaaaaaaataggtgatgatgcaactctatcatgtaatcgaaataatacaaatgactacgttgttatgagtgcttggtataaggagcccaattccattattcttttagctgctaaaagcgacgtcttgtattttgataattataccaaggataaaatatcttacgactctccatacgatgatctagttacaactatcacaattaaatcattgactgctagagatgccggtacttatgtatgtgcattctttatgacatcaactacaaatgacactgataaagtagattatgaagaatactccacagagttgattgtaaatacagatagtgaatcgactatagacataatactatctggatctacacattcaccggaaactagttctgagaaacctgattatatagataattctaattgctcgtcggtattcgaaatctaagctcaaaaattgaaaaactagcgtctttttttgctcgaagtcgaccaccatggtgggtgaggatagcgtgctgatcaccgagaacatgcacatgaaactgtacatggagggcaccgtgaacgaccaccacttcaagtgcacatccgagggcgaaggcaagccctacgagggcacccagaccatgaagatcaaggtggtcgagggcggccctctccccttcgccttcgacatcctggctaccagcttcatgtacggcagcaaaacctttatcaaccacacccagggcatccccgacttctttaagcagtccttccctgagggcttcacatgggagaggatcaccacatacgaagacgggggcgtgctgaccgctacccaggacaccagcctccagaacggctgcctcatctacaacgtcaagatcaacggggtgaacttcccatccaacggccctgtgatgcagaagaaaacactcggctgggaggccagcaccgagatgctgtaccccgctgacagcggcctgagaggccatagccagatggccctgaagctcgtgggcgggggctacctgcactgctccctcaagaccacatacagatccaagaaacccgctaagaacctcaagatgcccggcttctacttcgtggacaggagactggaaagaatcaaggaggccgacaaagagacctacgtcgagcagcacgagatggctgtggccaggtactgcgacctgcctagcaaactggggcacagctgattaattaatttttatcgatctaattcaacaatgtctggagagcttcgcaggatcccgactccggaaccaattactgataaagaagatcatacagttacagacactgtctcatacactacagtaagtacatcatctggaattgtcactactaaatcaaccaccgatgatgcggatctttatgatacgtacaatgataatgatacagtaccaccaactactgtaggcggtagtacaacctctattagcaattataaaaccaaggactttgtagaaatatttggtattaccgcattaattatattgtcggccgtggcaattttctgtattacatattatatatataataaacgttcacgtaaatacaaaacagagaacaaagtctagatttttgacttacataaatgtctgggatagtaaaatctatcatattgagcggaccatctggtttaggaaagacagccatagccaaaagactatgggaatatatttggatttgtggtgtcccataccactagatttcctcgtcctatggaacgagaaggtgttgattaccattacgttaacagagaggccatctggaagggaatagccgccggaaactttctagaacatactgagtttttaggaaatatttacggaacttctaaaacagctgtgaatacagcggctattaataatcgtatttgtgtgatggatctaaacatcgacggtgttagaagtcttaaaaatacgtacctaatgccttactcggtgtatataagacctacctctcttaaaatggttgagaccaagcttcgtcgtagaaacactgaagctaacgatgagattcatcgtcgtgtgatgttggcaaaaactgacatggatgaggcaggtgaagccggtctattcgacactattatcattgaagatgatgtgaatttagcatatagtaagttaattcagatactacaggaccgtattagaatgtattttaacactaattagagacttaagacttaaaacttgataattaataatataactcgtttttatatgtgtctatttcaacgtctaatgtattagttaaatattaaaacttaccacgtaaaacttaaaatttaaaatgatatttcattgacagatagatcacacattatgaactttcaaggacttgtgttaactgacaattgcaaaaatcaatgggtcgttggaccattaataggaaaaggtggattcggtagtatttatactactaatgacaataattatgtagtaaaaatagagcccaaagctaacggatcattatttaccgaacaggcattttatactagagtacttaaaccatccgttatcgaagaatggaaaaaatctcacaatataaagcacgtaggtcttatcacgtgcaaggcatttggtctatacaaatccattaatgtggaatatcgattcttggtaattaatagattaggtgcagatctagatgcggtgatcagagccaataataatagactaccaaaaaggtcggtgatgttgatcggaatcgaaatcttaaataccatacaatttatgcacgagcaaggatattctcacggagatattaaagcgagtaatatagtcttagatcaaatagataagaataaattatatctagtggattacggattggtttctaaattcatgtctaatggcgaacatgttccatttataagaaatccaaataaaatggataacggtactctagaatttacacctatagattcgcataaaggatacgttgtatctagacgtggagatctagaaacacttggatattgtatgattagatggttgggaggtatcttaccatggactaagatatctgaaacaaagaattgtgcattagtaagtgccacaaaacagaaatatgttaacaatactgcgactttgttaatgaccagtttgcaatatgcacctagagaattgctgcaatatattaccatggtaaactctttgacatattttgaggaacccaattacgacaagtttcggcacatattaatgcagggtgtatattattaagtgtggtgtttggtcgataaaaattaaaaaataacttaatttattattgatctcgtgtgtacaaccgaaatcatggcgatgttttacgcacacgctctcggtgggtacgacgagaatcttcatgcctttcctggaatatcatcgactgttgccaatgatgtcaggaaatattctgttgtgtcagtttataataacaagtatgacattgtaaaagacaaatatatgtggtgttacagtcaggtgaacaagagatatattggagcactgctgcctatgtttgagtgcaatgaatatctacaaattggaaatccgatccatgatcaagaaggaaatcaaatctctatcatcacatatcgccacaaaaactactatgctctaagcggaatcgggtacgagagtctagacttgtgtttggaaggagtagggattcatcatcacgtacttgaaacaggaaacgctgtatatggaaaagttcaacatgattattctactatcaaagagaaggccaaagaaatgagtgcacttagtccaggacctatcatcgattaccacgtctggataggagattgtatctgtcaagttactgctgtggacgtacatggaaaggaaattatgaaaatgagattcaaaaagggtgcggtgcttccgatcccaaatctggtaaaagttaaacttggggagaatgatacagaaaatctttcttctactatatcggcggcaccatcgaggtaaccacctctctggaagacagcgtgaatcatgtactcatgaaacgtttggaaactatacgccatatgtggtctgttgtatatgatcattttgatattgtgaatggtaaagaatgctgttatgtgcatacgcattcatctaatcaaaatcctataccgagtactgtaaaaacaaatttgtacatgaagactatgggatcatgcattcaaatggattccatggaagctctagagtatcttagcgaactgaaggaatcaggtggatggagtcccagaccagaaatgcaggaatttgaatatccagatggagtggaagacactgaatcaattgagagattggcagaggagttcttcaatagatcagaacttcaggctggtgaatcagtcaaatttggtaattctattaattgttaaacatacatctgtttcagctaagcaactaagaacacgtatacggcagcagcttccttctatactctcatcttttaccaacacaaagggtggatatttgttcattggagttgataataatacacacaaagtatttggattcacggtgggttacgactacctcagactgatagagaatgatatagaaaagcatatcaaaagacttcgtgttgtgcatttctgtgagaagaaagaggacatcaagtacgcgtgtcgattcatcaaggtatataaacctggggatgagactacctcgacatacgtgtgcgctatcaaagtggaaagatgctgttgtgctgtgtttgcagattggccagaatcatggtatatggatactaatggtatcaagaagtattctccagatgaatgggtgtcacatataaaattttaattaatgtaactatagagaacaaataataaggttgtaatatcatatagacaataactaacaattaattagtaactgttatctcttttttaactaaccaactaactatatacctattaatacatcgtaattatagttcttaacatctattaatcattaattcgcttctttaattttttataaactaacattgttaattgaaaagggataacatgttacagaatataaattatatatggatttttttaaaaaggaaatacttgactggagtatatatttatctcttcattatatagcacgcgtgttttccaatttttccacatcccatataatacaggattataatctcgttcgaacatacgagaaagtggataaaacaatagttgattttttatctaggttgccaaatttattccatattttagaatatggggaaaatattctacatatttattctatggatgatgctaatacgaatattataattttttttctagatagagtattaaatattaataagaacgggtcatttatacacaatctcgggttatcatcatccattaatataaaagaatatgtatatcaattagttaataatgatcatccagataataggataagactaatgcttgaaaatggacgtagaacaagacattttttgtcctatatatcagatacagttaatatctatatatgtattttaataaatcatggattttatatagatgccgaagacagttacggttgtacattattacatagatgtatatatcactataagaaatcagaatcagaatcatacaatgaattaattaagatattgttaaataatggatcagatgtagataaaaaagatacgtacggaaacacaccttttatcctattatgtaaacacgatatcaacaacgtggaattgtttgagatatgtttagagaatgctaatatagactctgtagactttaatagatatacacctcttcattatgtctcatgtcgtaataaatatgattttgtaaagttattaatttctaaaggagcaaatgttaatgcgcgtaataaattcggaactactccattttattgtggaattatacacggtatctcgcttataaaactatatttggaatcagacacagagttagaaatagataatgaacatatagttcgtcatttaataatttttgatgctgttgaatctttagattatctattatccagaggagttattgatattaactatcgtactatatacaacgaaacatctatttacgacgctgtcagttataatgcgtataatacgttggtctatctattaaacaaaaatggtgattttgagacgattactactagtggatgtacatgtatttcggaagcagtcgcaaacaacaacaaaataataatggaagtactattgtctaaacgaccatctttgaaaattatgatacagtctatgatagcaattactaaacataaacagcataatgcagatttattgaaaatgtgtataaaatatactgcgtgtatgaccgattatgatactcttatagatgtacagtcgctacagcaatataaatggtatattttaagatgtttcgatgaaatagatatcatgaagagatgttatataaaaaataaaactgtattccaattagttttttgtatcaaagacattaatactttaatgagatacggtaaacatccttctttcgtgaaatgcactagtctcgacgtatacggaagtcgtgtacgtaatatcatagcatctattagatatcgtcagagattaattagtctattatccaagaagctggatcctggagataaatggtcgtgttttcctaacgaaataaaatataaaatattggaaaactttaacgataacgaactatccacatatctaaaaatcttataaacattattaaaatataaaatctaagtaggataaaatcacactacatcattgtttccttttagtgctcgacagtgtatactatttttaacgctcataaataaaaatgaaaacgatttccgttgttacgttgttatgcgtactacctgctgttgtttattcaacatgtactgtacccactatgaataacgctaaattaacgtctaccgaaacatcgtttaatgataaccagaaagttacgtttacatgtgatcagggatatcattctttggatccaaatgctgtctgtgaaacagataaatggaaatacgaaaatccatgcaaaaaaatgtgcacagtttctgattatgtctctgaactatataataaaccgctatacgaagtgaattccaccatgacactaagttgcaacggcgaaacaaaatattttcgttgcgaagaaaaaaatggaaatacttcttggaatgatactgttacgtgtcctaatgcggaatgtcaacctcttcaattagaacacggatcgtgtcaaccagttaaagaaaaatactcatttggggaatatatgactatcaactgtgatgttggatatgaggttattggtgcttcgtacataagttgtacagctaattcttggaatgttattccatcatgtcaacaaaaatgtgatatgccgtctctatctaacggattaatttccggatctacattttctatcggtggcgttatacatcttagttgtaaaagtggttttacactaacggggtctccatcatccacatgtatcgacggtaaatggaatcccatactcccaatatgtgtacgaactaacgaaaaatttgatccagtggatgatggtcccgacgatgagacagatttgagcaaactctcgaaagacgttgtacaatatgaacaagaaatagaatcgttagaagcaacttatcatataatcatagtggcgttgacaattatgggcgtcatatttttaatctccgttatagtattagtttgttcctgtgacaaaaataatgaccaatataagttccataaattgctaccgtaaatataaatccgttaaaataattaataatttaataacaaacaagtatcaaaagattaaagacttatagctagaatcaattgagatgtcttcttcagtggatgttgatatctacgatgccgttagagcatttttactcaggcactattataacaagagatttattgtgtatggaagaagtaacgccatattacataatatatacaggctatttacaagatgcgccgttataccgttcgatgatatagtacgtactatgccaaatgaatcacgtgttaaacaatgggtgatggatacacttaatggtataatgatgaatgaacgcgatgtttctgtaagcgttggcaccggaatactattcatggaaatgtttttcgattacaataaaaatagtatcaacaatcaactaatgtatgatataattaatagcgtatctataattctagctaatgagagatatagaagcgcttttaacgacgatggtatatacatccgtagaaatatgattaacaagttgtacggatacgcatctctaactactattggcacgatcgctggaggtgtttgttattatctgttgatgcatctagttagtttgtataaataattatttcaatatactagttaaaattttaagattttaaatgtataaaaaactaataacgtttttatttgtaataggtgcattagcatcctattcgaataatgagtacactccgtttaataaactgagtgtaaaactctatatagatggagtagataatatagaaaattcatatactgatgataataatgaattggtgttaaattttaaagagtacacaatttctattattacagagtcatgcgacgtcggatttgattccatagatatagatgttataaacgactataaaattattgatatgtataccattgactcgtctactattcaacgcagaggtcacacgtgtagaatatctaccaaattatcatgccattatgataagtacccttatattcacaaatatgatggtgatgagcgacaatattctattactgcagagggaaaatgctataaaggaataaaatatgaaataagtatgatcaacgatgatactctattgagaaaacatactcttaaaattggatctacttatatatttgatcgtcatggacatagtaatacatattattcaaaatatgatttttaaaaatttaaaatatattatcacttcagtgacagtagtcaaataacaaacaacaccatgagatatattataattctcgcagttttgttcattaatagtatacatgctaaaataactagttataagtttgaatccgtcaattttgattccaaaattgaatggactggggatggtctatacaatatatcccttaaaaattatggcatcaagacgtggcaaacaatgtatacaaatgtaccagaaggaacatacgacatatccgcatttccaaagaatgatttcgtatctttctgggttaaatttgaacaaggcgattataaagtggaagagtattgtacgggactatgcgtcgaagtaaaaattggaccaccgactgtaacattgactgaatacgacgaccatatcaatttgtacatcgagcatccgtatgctactagaggtagcaaaaagattcctatttacaaacgcggtgacatgtgtgatatctacttgttgtatacggctaacttcacattcggagattctaaagaaccagtaccatatgatatcgatgactacgattgcacgtctacaggttgcagcatagactttgtcacaacagaaaaagtgtgcgtgacagcacagggagccacagaagggtttctcgaaaaaattactccatggagttcgaaagtatgtctgacacctaaaaagagtgtatatacatgcgcaattagatccaaagaagatgttcccaatttcaaggacaaaatggccagagttatcaagagaaaatttaatacacagtctcaatcttatttaactaaatttctcggtagcacatcaaatgatgttaccacttttcttagcatgcttaacttgactaaatattcataactaatttttattaatgatacaaaaacgaaataaaactgcatattatacactggttaacgcccttataggctctaaccattttcaagatgaggtccctgattatagtccttctgttcccctctatcatctactccatgtctattagacgatgtgagaagactgaagaggaaacatggggattgaaaatagggttgtgtataattgccaaagatttctatcccgaaagaactgattgcagtgttcatctcccaactgcaagtgaaggattgataactgaaggcaatggattcagggatatacgaaacaccgataaattataaaaaaagcaatgtgtccgctgtttccgttaataatactattttcgtaactggcggattattcataaataactctaatagcacgatcgtggttaacaatatggaaaaacttgacatttataaagacaaacaatggtcgattatagaaatgcctatggctagggtatatcacggcattgactcgacatttggaatgttatattttgccggaggtctatccgttaccgaacaatatggtaatttagagaaaaacaacgagatatcttgttacaatcctagaacgaataagtggtttgatatttcatatactatttataagatatccatatcatcattgtgtaaactaaataacgtcttctatgtatttagtaaggacattggatatgtggaaaagtatgatggtgcatggaagttagtacatgatcgtctccccgctataaaggcattatcaacttctccttattgattgaaaatgaaaatataaatagtttttatgtatagcagtattaccctatagttttattgcttactactaacatggatacagatgttacaaatgtagaagatatcataaatgaaatagatagagagaaagaagaaatactaaaaaatgtagaaattgaaaataataaaaacattaacaagaatcatcccaatgaatatattagagaagcactcgttattaataccagtagtaatagtgattccattgataaagaagttatagaatgtatcagtcacgatgtaggaatatagatcatatctactaatttttataatcgatacaaaacataaaaaacaactcgttattacatagcaggcatggaatccttcaagtattgttttgataacgatggcaagaaatggattatcggaaatactttatattctggtaattcaatactctataaggtcagaaaaaatttcactagttcgttctacaattacgtaatgaagatagatcacaaatcacacaagccattgttgtctgaaatacgattctatatatctgtattggatcctttgactatcgacaactggacacgggaacgtggtataaagtatttggctattccagatctgtatggaattggagaaaccgatgattatatgttcttcgttataaagaattcgggaagagtattcgccccaaaggatactgaatcagtcttcgaagcatgcgtcactatgataaacacgttagagtttatacactctcgaggatttacccatggaaaaatagaaccgaggaatatactgattagaaataaacgtctttcactaattgactattctagaactaacaaactatacaagagtggaaactcacatatagattacaacgaggacatgataacttcaggaaatatcaattatatgtgtgtagacaatcatcttggagcaacagtttcaagacgaggagatttagaaatgttgggatattgcatgatagaatggttcggtggcaaacttccatggaaaaacgaaagtagtataaaagtaataaaacaaaaaaaagaatataaaaaatttatagctactttctttgaggactgttttcctgaaggaaatgaacctctggaattagttagatatatagaattagtatacacgttagattattctcaaactcctaattatgacagactacgtaaactgtttatacaagattgaaattatattcttttttttatagagtgtggtagtgttacggatatctaatattaatattagactatctctatcgcgctacacgaccaatatcgattactatggatatcttctatgaaaggagagaatgtatttatttctccagcgtcaatctcgtcagtattgacaatactgtattatggagctaatggatccactgctgaacagctatcaaaatatgtagaaacggaggagaacacggataaggttagcgctcagaatatctcattcaaatccatgaataaagtatatgggcgatattctgccgtgtttaaagattcctttttgagaaaaattggcgataagtttcaaactgttgacttcactgattgtcgcactatagatgcaatcaacaagtgtgtagatatctttactgaggggaaaatcaatccactattggatgaaccattgtctcctagcaattagtgccgtatactttaaagcaaaatggttgacgccattcgaaaaggaatttaccagtgattatcccttttacgtatctccgacggaaatggtagacgtaagtatgatgtctatgtacggcaaggcatttaatcacgcatctgtaaaagaatcattcggcaacttttcaatcatagaactgccatatgttggagatactagtatgatggtcattcttccagacaagattgatggattagaatccatagaacaaaatctaacagatacaaattttaagaaatggtgtgactttatggatgctatgtttatagatgttcacattcccaagtttaaggtaacaggctcgtataatctggtggatactctagtaaagtcaggactgacagaggtgttcggttcaactggagattatagcaatatgtgtaatttagatgtgagtgtcgacgctatgatccacaaaacgtatatagatgtcaatgaagagtatacagaagcagctgcagcaacttctgtactagtggcagactgtgcatcaacaattacaaatgagttctgtgcagatcatccgttcatctatgtgattaggcatgttgatggaaaaattcttttcgttggtagatattgctctccgacaactaattgttaaccattttttttaaaaaaaatagaaaaaacatgtggtattagtgcaggtcgttgttcttccaattgcaattggtaagatgacggccaactttagtacccacgtcttttcaccacagcactgtggatgtgacagactgaccagtattgatgacgtcaaacaatgtttgactgaatatatttattggtcgtcctatgcataccgcaacaggcaatgcgctggacaattgtattccacactcctctcttttagagatgatgcggaattagtgttcatcgacattcgcgagctggtaaaaaatatgccgtgggatgatgtcaaagattgtacagaaatcatccgttgttatataccggatgagcaaaaaaccatcagagagatttcggccatcatcggactttgtgcatatgctgctacttactggggaggtgaagaccatcccactagtaacagtctgaacgcattgtttgtgatgcttgagatgctaaattacgtggattataacatcatattccggcgtatgaattgatgagttgtacatcttgacattttctttcttctcttctccctttcttctcttctcccttcctccctcttctccctttcccagaaacaaacttttttacccactataaaataaaatgagtatactacctattatatttcttcctatatttttttattcttcattcgttcagacttttaacgcgtctgaatgtatcgacaaagggcaatattttgcatcattcatggagttagaaaacgagccagtaatcttaccatgtcctcaaataaatacgctatcatccggatataatatattagatattttatgggaaaaacgaggagcggataatgatagaattataccgatagataatggtagcaatatgctaattctgaacccgacacaatcagactctggtatttatatatgcattaccacgaacgaaacctactgtgacatgatgtcgttaaatttgacaatcgtgtctgtctcagaatcaaatatagatcttatctcgtatccacaaatagtaaatgagagatctactggcgaaatggtatgtcccaatattaatgcatttattgctagtaacgtaaacgcagatattatatggagcggacatcgacgccttagaaataagagacttaaacaacggacacctggaattattaccatagaagatgttagaaaaaatgatgctggttattatacatgtgttttagaatatatatacggtggcaaaacatataacgtaaccagaattgtaaaattagaggtacgggatagaataataccttctactatgcaattaccagatggcattgtaacttcaataggtagtaatttgactattgcatgcagagtatcgttgagacctcccacaacggacaccgacgtcttttggataagtaatggtatgtattacgaagaagatgatggggacggaaacggtagaataagtgtagcaaataaaatctatatgaccgataagagacgtgttattacatcccggttaaacattaatcctgtcaaggaagaagatgctacaacgtttacgtgtatggcgtttactattcctagcatcagcaaaacagttactgttagtataacgtgaatgtatgttgttacatttccatgtcaattgagtttataagaatttttatacattatcttccaacaaacaattgacgaacgtattgctatgattaactcccacgatactatgcatattattaatcattaacttgcagactatacctagtgctattttgacatactcgtgttcttgtgtaattgcggtatctatattattaaagtacgtaaatctagctatagttttattatttaattttagataatataccgtctccttatttttaaaaattgccacatcctttattaaatcatgaatgggaatttctatgtcatcgttagtatattgtgaacaacaagagcagatatctataggaaagggtggaatgcgatacattgatctatgtagttttaaaacacacgcgaactttgaagaatttatataaatcattccatcgatacatccttctatgttgacatgtatatatccaggaattcttttattaatgtcaggaaatgtataaactaaaacattgcccgaaagcggtgcctctatctgcgttatatccgttcttaacttacaaaatgtaaccaatacctttgcatgacttgttttgttcggcaacgttagtttaaacttgacgaatggattaattacaatagcatgatccgcgcatctattaagtttttttactttaacgcccttgtatgtttttacagagactttatctaaatttctagtgcttgtatgtgttataaatataacgggatatagaaccgaatcacctaccttagatacccaattacattttatcagatccagataataaacaaattttgtcgccctaactaattctatattgttatatattttacaattggttatgatatcatgtaataacttggagtctaacgcgcatcgtcgtacgtttatacaattgtgatttagtgtagtatatctacacatgtatttttccgcactatagtattctggactagtgataaaactatcgttatatctgtcttcaatgaactcatcgagatattgctctctgtcatattcatacacctgcataaactttctagacatcttacaatccgtgttattttaggatcatatttacatatttacgggtatatcaaagatgttagattagttaatgggaatcgtctataataatgaatattaaacaattatatgaggacttttaccacaaagcatcataaaaatgagtcgtcgtctgatttatgttttaaatatcaaccgcaaatcaactcataaaatacaagagaatgaaatatatacatattttagtcattgcaatatagaccatacttctacagaacttgattttgtagttaaaaactatgatctaaacagacgacaacctgtaactgggtatactgcactacactgctatttgtataataattactttacaaacgatgtactgaagatattattaaatcatgacgtaaatgtaacgatgaaaaccagtagcggacgtatgcctgtttatatattgcttactagatgttgtaatatttcacatgatgtagtgatagatatgatagacaaagataaaaaccacttattacatagagactattccaacctattactagagtatataaaatctcgttacatgttattgaaggaagaggatatcgatgagaacatagtatccactttattagataagggaatcgatcctaactttaaacaagacggatatacagcgttacattattattatttgtgtctcgcacacgtttataaactaggtgagtgtagaaaaccgataacgataaaaaaggccaagcgaattatttctttgtttatacaacatggagctaatctaaacgcgttagataattgtggtaatacaccattccatttgtatcttagtattgaaatgtgtaataatattcatatgactaaaatgctgttgacttttaatccgaatttcaaaatatgtaataatcatggattaacgcctatactatgttatataacttccgactacatacaacacgatattcttgttatgttaatacatcactatgaaacaaatgttggagaaatgccgatagatgagcgtcgtatgatcgtattcgagtttatcaaaacatattctacacgtccggcagattcgataacttatttgatgaataggtttaaaaatataaatatttatacccgctatgaaggaaagacattattacacgtagcatgtgaatataataatacacaagtaatagattatcttatacgtatcaacggagatataaatgcgttaaccgacaataacaaacacgctacacaactcattatagataacaaagaaaattccccatataccattaattgtttactgtatatacttagatatattgtagataagaatgtgataagatcgttggtggatcaacttccatctctacctatcttcgatataaaatcatttgagaaattcatatcctactgtatacttttagatgacacattttacgataggcacgttaagaatcgcgattctaaaacgtatcgatacgcattttcaaaatacatgtcgtttgataaatacgatggtataataactaaatgtcacgacgaaacaatgttactcaaactgtccactgttctagacactacactatatgcagttttaagatgtcataattcgagaaagttaagaagatacctcaacgagttaaaaaaatataataacgataagtcctttaaaatatattctaatattatgaatgagagataccttaatgtatattataaagatatgtacgtgtcaaaggtatatgataaactatttcctgttttcacagataaaaattgtctactaacattactaccttcagaaattatatacgaaatattatacatgctgacaattaacgatctttataatatatcgtatccacctaccaaagtatagttgtatttttctcatgcgatgtgtgtaaaaaaactgatattatataaatattttagtgccgtataataaagatgacgatgaaaatgatggtacatatatatttcgtatcattattgttattgctattccacagttacgccatagacatcgaaaatgaaatcacagaattcttcaataaaatgagagatactctaccagctaaagactctaaatggttgaatccagcatgtatgttcggaggcacaatgaatgatatagccgctctaggagagccattcagcgcaaagtgtcctcctattgaagacagtcttttatcgcacagatataaagactatgtggttaaatgggagaggctagaaaagaatagacggcgacaggtttctaataaacgtgttaaacatggtgatttatggatagccaactatacatctaaattcagtaaccgtaggtatttgtgcaccgtaactacaaagaatggtgactgtgttcagggtatagttagatctcatattaaaaaacctccttcatgcattccaaaaacatatgaactaggtactcatgataagtatggcatagacttatactgtggaattctttacgcaaaacattataataatataacttggtataaagataataaggaaattaatatcgacgacattaagtattcacaaacgggaaaggaattaattattcataatccagagttagaagatagcggaagatacgactgttacgttcattacgacgacgttagaatcaagaatgatatcgtagtatcaagatgtaaaatacttacggttataccgtcacaagaccacaggtttaaactaatactagatccgaaaatcaacgtaacgataggagaacctgccaatataacatgcactgctgtgtcaacgtcattattgatcgacgatgtactgattgaatgggaaaatccatccggatggcttataggattcgattttgatgtatactctgttttaactagtagaggcggtatcaccgaggcgaccttgtactttgaaaatgttactgaagaatatataggtaatacatataaatgtcgtggacacaactattattttgaaaaaacccttacaactacagtagtattggagtaaatatacaatgcatttttatatacattactgaattattattactgaattattattactgaattattattaattatatcgtatttgtgctatagaatggatgaagatacgcgactatctaggtatttgtatctcaccgatagagaacatataaatgtagactctattaaacagttgtgtaaaatatcagatcctaatgcatgttatagatgtggatgtacggctttacatgagtacttttataattatagatcagtcaacggaaaatacaagtatagatacaacggttactatcaatattattcatctagcgattatgaaaattataatgaatattattatgatagaactggtatgaacagtgagagtgataatatatcaatcaaaacagaatatgaattctatgatgaaacacaagatcaaagtacacaactagtaggttacgacattaaactcaaaaccaatgaggatgattttatggctatgatagatcagtgggtgtccatgattatatagatgaatcaattaataaagtagtatatggaagagagtctcacgtaagatggcgggatatatggcaagaacataatgatggcgtatacagtataggaaaggagtgcatagataatatatacgaagacaaccataccgtagacgaattctacaagatagacagcgtatcagatgtagatgacgcggaacacatatctccgataactaaaaaaccatagaatcagttgatgataatacctacatttctaatcttccgtataccatcaaatacaaaatattcgagcaacaataagtattttttatacctttaaaactgataaataaattttttctagtgatattttggcaagatgagaatcctatttctcatcgctttcatgtatgggtgtgttcactcatatgttaacgcggttgaaaccaaatgtccaaatctagacattgtaacatcttctggagaatttcattgttcaggatgtgtggaacatatgcctgagtttagctatatgtattggttggcaaaggatatgaaatcggacgaggataccaagtttatagaacatctgggtgatggcatcaaagaagatgaaaccgttcgtaccacagatagtggaatcgtcactctacgtaaagtccttcatgtgactgatactaataaatttgataattataggttcacttgtgtcctcgctacgctagatggcatttataaaaagaatgtttgctgaagtagttgtgtgctactatttttatttatgatataatctaatggaattaatttgaattgatatttatccaatactaaagattatattagaatcaaattaatcttttatacgagaaaaaataacgacatacgtcgtcaacaaattaaactttttatttattagttaactagcttatagaacttgctcattgttatgtttctaaaacgggtacggcatataggacaattatccgacgcaccggtttctcttcgtgttctatgccatatattgatgcatgttatgcaaaatatatgagtacacgaatccaataaaccaaagtatctatcgttttgagtaaacaacttcatagcaaattccacattctttttctttacttactctatacacgtcctcgtatttatttagtattttgatgatatccaactcagaaatggttgttgtattattgggtgtatttggagtataggtattattagctatgtaccaatttaccaaccctcttaatattgattgataatcacatcggttatccaattaataactaaattgtagtgtatatatagaccatatatgtttctatttttttgacagttacgtatagtttcagtaagttttgattgttgtattcctgtatctctagataagttagtcatatagtcccttccggcgatacgttttttccaagcccgaaattgattagccaaatgtgtatttatttttgtgatattgatataatatttcggataatgcatactgttagtcttatatcatttggttcatctatgtattgtaatattgttacatgatctatagatgatgtattgattttggcaggatcgaattccatatccgcgactaaacagtgaaaaaaatgtaaatactttttaaattttaaattagtaaaacttttttttattttttatgattccaaaaatactgaatacaaagtcctaaattataaatatggagatcatactaccacaacttattattatgtatacaaggccggtgtaatagatagatatatataattctattacaccggcagacaattaccgaccggtatttgtcgttaccaacataccgtataatatgtaatatacaattccataacccattgacagttgttatacatcaaaattgcaattcttttgattacgatgttataagaatgtagttaattgatgtatgatgttaatgtgtcctctttcctcttataacatcgtaatcaaaaacttttttataatatatacctaataatgtgtcttaatagttctcgtgattcgtcaaacaatcattcttataaaatataataaagcaacgtaaaaacacataaaaataagcgtaactaataagacaatggatatttacgacgataaaggtctacagactattaaactgtttaataatgaatttgattgtataaggaatgacatcagagaattatttaaacatgtaactgattccgatagtatacaacttccgatggaagacaattctgatattatagaaaatatcagaaaaatactatatagacgattaaaaaatgtagaatgtgttgacatcgataacacaataacttttatgaaatacgatccaaatgatgataataagcgtacgtgttctaattgggtacccttaactaataactatatggaatattgtctagtaatatatttggaaacaccgatatgtggaggcaaaataaaattataccaccctacaggaaatataaagtcggataaggatattatgtttgcaaagactctagactttaaatcaacgaaagtgttaactggacgtaaaacaattgccgttctagacatatccgtttcatataatagatcaatgactactattcactacaacgacgacgttgatatagatatacatactgataaaaatggaaaagagttatgttattgttatataacaatagatgatcattacttggttgatgtggaaactataggagttatagtcaatagatctggaaaatgtctgttagtaaataaccatctaggtataggtatcgttaaagataaacgtataagcgatagttttggagatgtatgtatggatacaatatttgacttttctgaagcacgagagttattttcattaactaatgatgataacaggaatatagcatgggacactgataaactagacgatgatacagatatatggactcccgtcacagaagatgattacaaatttctttctagactagtattgtatgcaaaatctcaatcggatactgtatttgactattatgttcttactggtgatacggaaccacccactgtattcattttcaaggtaactagattttactttaatatgccgaaataaaaaatttttgtataatatctagaggtagaggtattgtttagataaatacaaataacatagatacatcgcatacttagcatttttataaatatacataagacatacactttatacatttttgtaaaaatactcataaaaaaatttataaaaattatggcacaaccatatcttgtataggtagtttagttcgtcgagtgaacctataaacagataatagacaacacataataatgcctactaatacaagcataataccgggagatgggatatatgacgttgtagtgtttgggttttctgaacgttgatagtctactaatactacatgctgacatctaatgcctgtataaccatgagagcatctacaatacataccgtcaatatctctagcgtggatacagtcaccgtgtaaacaatatccatctccctctggaccgcataatctgatagctggaatatctgttgtagcgtttgtaatttctggcaatgtcgtttcgatagcgttaccactatcggcgaatgatctgattatcatagcagcgaacaacaacatcagataatttatcaacatttttgatggattctgtgtttatgctgtttctcagtgtgtgtttatgacaagattgggaattttatattattaattcagtaatataaactaataatatattgttaattgtgtaaataatataaaaataacaatacaatattgaatgtgttgctgttaaaaatgtatgtgttaatataatagaataaaataaatgagtatgatcattttagataacgattgattttatcattaccgcttcattcttatattctttgcttacggaacctatatttagaaacatctactaacaattttttatgcttgcattattaatggtatgtaatatgattgattgtgtacgcaataccaatttgttaagtatgaatacggggtacaaacataaattgaaatttaacattatttatttatgatatatatcgttatcgttaggtctataccatggatatctttaaagaactaatcttaaaacaccctgatgaaaatgttttgatttctccagtttccattttatctactttatctattctaaatcatggagcagctggttctacagctgaacaactatcaaaatatatagagaatatgaatgagaatacacccgatgacaataatgatgacatggaggtagatattccgtattgtgcgacactagctaccgcaaataaaatatacggtagcgatagtatcgagttccacgcctccttcctacaaaaaataaaagacgattttcaaactgtaaactttaataatgctaaccaaacaaaggaactaatcaacgaatgggttaagacaatgacaaatggtaaaattaattccttattgactagtccgctatccattaatactcgtatgacagttgttagcgccgtccattttaaagcaatgtggaaatatccattttctaaacatcttacatatacagacaagttttatatttctaagaatatagttaccagcgttgatatgatggtgggtaccgagaataacttgcaatatgtacatattaatgaattattcggaggattctctattatcgatattccatacgagggaaactctagtatggtaattatactaccggacgacatagaaggtatatataacatagaaaaaaatataacagatgaaaaatttaaaaaatggtgtggtatgttatctactaaaagtatagacttgtatatgccaaagtttaaagtggaaatgacagaaccgtataatctggtaccgattttagaaaatttaggacttactaatatattcggatattatgcagattttagcaagatgtgtaatgaaactatcactgtagaaaaatttctacatacgacgtttatagatgttaatgaggagtatacagaagcatcggccgttacaggagtatttacgattaacttttcgatggtatatcgtacgaaggtctacataaaccatccattcatgtacatgattaaagacaccacaggacgtatactttttatagggaaatactgctatccgcaataaatataaacaaatagacttttataaagagtcttcaacgataagtatatcgacatactacttatgctgcgaaagattctgaacgagaacgactatctcaccctcttggatcatatccgcactgctaaatactaaatctccactacactttttatcatcttatgaggaatgattgccttcgtgaaataggaataattagcaccagaatagctatggattattgtggtagagagtgcactattctatgtcgtctactggatgaagatgtgacgtacaaaaaaataaaactagaaattgaaacgtgtcacaacttatcaaaacatatagatagacgaggaaacaatgcgctacattgttacgtctccaataaatgcgatacagacattaagattgttctctcgcggagtcgagagactttgtagaaacaacgaaggattaactccgctaggagtatacagtaagcatagatacgtaaaatctcagattgtgcatctactgatatccagctattcaaattcctctaacgaactcaagtcgaatataaatgatttcgatctgtattcggataatatcgacttacgtctgctaaaatacctaattgtggataaacggatacgtccgtccaagaatacgaattatgcaatcaatggtctcggattggtggatatatacgtaacgacgcctaatccgagaccagaagtattgctatggcttcttaaatcagaatgttacagcaccggttacgtatttcgtacctgtatgtacgacagtgatatgtgtaagaactctcttcattactatatatcgtctcatagagaatctcaatctctatccaaggatgtaattaaatgtttgatcgataacaatgtttccatccatggcagagacgaaggaggatctttacccatccaatactactggtctttctcaaccatagatatagagattgttaaattattattaataaaggatgtggacacgtgtagagtatacgacgtcagccctatattagaggcgtattatctaaacaagcgatttagagtaaccccatataatgtagacatggaaatcgttaatcttcttattgagagacgtcatactcttgtcgacgtaatgcgtagtattacttcgtacgattccagagaatataaccactacatcatcgataacattctaaagagatttagacaacaggatgaatccatcgtacaagccatactgataaactacttacattacggcgatatggtcgttcgatgcatgttagataacggacaacaactatcctctacacgactactttgttaataataatctcgtcgatgtaaacgtcgtaaggtttatcgtggaaaatatggacacgcggctgtaaatcacgtatcgaacaatggccgtctatgtatgtacggtctgatattatcgagatttaataattgcgggtatcactgttatgaaaccatactgatagatgtatttgatatactaagcaagtacatggatgatatagatatgatcgataactctactatattacgcggtcgatgtcaataatatacaatttgcaaagcggttattggaatatggagcgagtatcacgctcgataatcaatacggccatccagaaaagcagttacagaagagaaaacaaaacgaaatcgttgttctacaagatgtctctccctacgacgattactacgtaaaaaagatactagcctactgcctattaagggacgagtcattcgcggaactacatagtaaattctgtttaaacgaggactataaaagtgtatttatgaaaaatatatcattcgataagatagattccatcatcgtgacataagtcgcctcaaagagattcgaatctccgacaccgacctgtatacggtatcacagctatcttaaagccatacattcagacagtcacatttcatttcccatgtacgacgatctcatagaacagtgccatctatcgatggagcgtaaaagtaaactcgtcgacaaagcactcaataaattagagtctaccatcggtcaatctagactatcgtatttgcctccggaaattatgcgcaatatcatctaaacagtatgttgtacggaaagaaccattacaaatattatccatgatagaaagaaaatatctatatgattggagaagtaggaaacaggaacaagacaacgattactacattattaaatcatgaagtccgtattatactcgtatatattgtttctctcatgtataataataaacggaagagatatagcaccgcatgcaccatccgatggaaagtgtaaagacaacgaatacaaacgccataatttgtgtccgggaacatacgcttccagattatgcgatagcaagactaacacacgatgtacgccgtgtggttcgggtaccttcacatctcgcaataatcatttacccgcttgtctaagttgtaacggaagacgcgatcgtgtaacacgactcacaatagaatctgtgaatgctctcccggatattattgtcttctcaaaggatcatccggatgcaaggcatgtgtttcccaaacaaaatgtggaataggatacggagtatccggagacgtcatctgttctccgtgtggtctcggaacatattctcacaccgtctcttccgcagataaatgcgaacccgtacccagaaatacgtttaactatatcgatgtggaaattaacctgtatccagttaacgacacgtcgtgtactcggacgaccactaccggtctcagcgaatccatctcaacgtcggaactaactattactatgaatcataaagactgtaatcccgtatttcgtgatggatacttctccgttcttaataaggtagcgacttcaggtttctttacaggagaaaggtgtgcactctgaatttcgagattaaatgcaataacaaagattcttcctccaaacagttaacgaaagcaaagaatgatactatcatgccgcattcggagacagtaactctagtgggcgacatctatatactatatagtaataccaatactcaagactacgaaactgatacaatctcttatcatgtgggtaatgttctcgatgtcgatagccatatgcccggtagttgcgatatacataaactgatcactaattccaaacccacccactttttatagtaagtttttcacccataaataataaatacaataattaatttctcgtaaaagtagaaaatatattctaatttattgcacggtaaggaagtagaatcataaagaacagtactcaatcaatagcaattatgaaacaatatatcgtcctggcatgcatgtgcctggcggcagctgctatgcctgccagtcttcagcaatcatcctcatcctcctcctcgtgtacggaagaagaaaacaaacatcatatgggaatcgatgttattatcaaagtcacaaagcaagaccaaacaccgaccaatgataagatttgccaatccgtaacggaaattacagagtccgagtcagatccagatcccgaggtggaatcagaagatgattccacatcagtcgaggatgtagatcctcctaccacttattactccatcatcggtggaggtctgagaatgaactttggattcaccaaatgtcctcagattaaatccatctcagaatccgctgatggaaacacagtgaatgctagattgtccagcgtgtccccaggacaaggtaaggactctcccgcgatcactcatgaagaagctcttgctatgatcaaagactgtgaagtgtctatcgacatcagatgtagcgaagaagagaaagacagcgacatcaagacccatccagtactcgggtctaacatctctcataagaaagtgagttacgaagatatcatcggttcaacgatcgtcgatacaaaatgcgtcaagaatctagagtttagcgttcgtatcggagacatgtgcaaggaatcatctgaacttgaggtcaaggatggattcaagtatgtcgacggatcggcatctgaaggtgcaaccgatgatacttcactcatcgattcaacaaaactcaaagcgtgtgtctgaatcgataactctattcatctgaaattggatgagtagggttaatcgaacgattcaggcacaccacgaattaaaaaagtgtaccggacactatattccggtttgcaaaacaaaaatgttcttaactacattcacaaaaagttacctctcgcgacttcttctttttctgtctcaatagtgtgatacgattatgacactattcctattcctattcctatttcctttcagagtatcacaaaaatattaaacctctttctgatggtctcataaaaaaagttttacaaaaatatttttattctctttctctctttgatggtctcataaaaaaagttttacaaaaatatttttattctctttctctctttgatggtctcataaaaaaagttttacaaaaatatttttattctctttctctctttgatggtctcataaaaaaagttttacaaaaatatttttattctctttctctctttgatggtctcataaaaaaagttttacaaaaatatttttattctctttctctctttgatggtctcataaaaaaagttttacaaaaatatttttattctctttctctctttgatggtctcataaaaaaagttttacaaaaatatttttattctctttctctctttgatggtctcataaaaaaagttttacaaaaatatttttattctctttctctctttgatggtctcataaaaaaagttttacaaaaatatttttattctctttctctctttgatggtctcataaaaaaagttttacaaaaatatttttattctctttctctctttgatggtctcataaaaaaagttttacaaaaatatttttattctctttctctctttgatggtctcataaaaaaagttttacaaaaatatttttattctctttctctctttgatggtctcataaaaaagttttacaaaaatatttttattctctttctctctttgatggtctcataaaaaagttttacaaaaatatttttattctctttctctctttgatggtctcataaaaaaagttttacaaaaatatttttattctctttctctctttgatggtctcataa

SEQ ID NO: 12 - DNA, 201471 bp, Artificial Sequence
  GLV-1h189
ttatgagaccatcaaagagagaaagagaataaaaatatttttgtaaaactttttttatgagaccatcaaagagagaaagagaataaaaatatttttgtaaaacttttttatgagaccatcaaagagagaaagagaataaaaatatttttgtaaaacttttttatgagaccatcaaagagagaaagagaataaaaatatttttgtaaaactttttttatgagaccatcaaagagagaaagagaataaaaatatttttgtaaaactttttttatgagaccatcaaagagagaaagagaataaaaatatttttgtaaaactttttttatgagaccatcaaagagagaaagagaataaaaatatttttgtaaaactttttttatgagaccatcaaagagagaaagagaataaaaatatttttgtaaaactttttttatgagaccatcaaagagagaaagagaataaaaatatttttgtaaaactttttttatgagaccatcaaagagagaaagagaataaaaatatttttgtaaaactttttttatgagaccatcaaagagagaaagagaataaaaatatttttgtaaaactttttttatgagaccatcaaagagagaaagagaataaaaatatttttgtaaaactttttttatgagaccatcaaagagagaaagagaataaaaatatttttgtaaaactttttttatgagaccatcaaagagagaaagagaataaaaatatttttgtaaaactttttttatgagaccatcaaagagagaaagagaataaaaatatttttgtaaaactttttttatgagaccatcagaaagaggtttaatatttttgtgatactctgaaaggaaataggaataggaataggaatagtgtcataatcgtatcacactattgagacagaaaaagaagaagtcgcgagaggtaactttttgtgaatgtagttaagaacatttttgttttgcaaaccggaatatagtgtccggtacacttttttaattcgtggtgtgcctgaatcgttcgattaaccctactcatccaatttcagatgaatagagttatcgattcagacacacgctttgagttttgttgaatcgatgagtgaagtatcatcggttgcaccttcagatgccgatccgtcgacatacttgaatccatccttgacctcaagttcagatgattccttgcacatgtctccgatacgaacgctaaactctagattcttgacgcattttgtatcgacgatcgttgaaccgatgatatcttcgtaactcactttcttatgagagatgttagacccgagtactggatgggtcttgatgtcgctgtctttctcttcttcgctacatctgatgtcgatagacacttcacagtctttgatcatagcaagagcttcttcatgagtgatcgcgggagagtccttaccttgtcctggggacacgctggacaatctagcattcactgtgtttccatcagcggattctgagatggatttaatctgaggacatttggtgaatccaaagttcattctcagacctccaccgatgatggagtaataagtggtaggaggatctacatcctcgactgatgtggaatcatcttctgattccacctcgggatctggatctgactcggactctgtaatttccgttacggattggcaaatcttatcattggtcggtgtttggtcttgctttgtgactttgataataacatcgattcccatatgatgtttgttttcttcttccgtacacgaggaggaggatgaggatgattgctgaagactggcaggcatagcagctgccgccaggcacatgcatgccaggacgatatattgtttcataattgctattgattgagtactgttctttatgattctacttccttaccgtgcaataaattagaatatattttctacttttacgagaaattaattattgtatttattatttatgggtgaaaaacttactataaaaagtgggtgggtttggaattagtgatcagtttatgtatatcgcaactaccgggcatatggctatcgacatcgagaacattacccacatgataagagattgtatcagtttcgtagtcttgagtattggtattactatatagtatatagatgtcgcccactagagttactgtctccgaatgcggcatgatagtatcattctttgctttcgttaactgtttggaggaagaatctttgttattgcatttaatctcgaaattcagagtgcacacctttctcctgtaaagaaacctgaagtcgctaccttattaagaacggagaagtatccatcacgaaatacgggattacagtctttatgattcatagtaatagttagttccgacgttgagatggattcgctgagaccggtagtggtcgtccgagtacacgacgtgtcgttaactggatacaggttaatttccacatcgatatagttaaacgtatttctgggtacgggttcgcatttatctgcggaagagacggtgtgagaatatgttccgagaccacacggagaacagatgacgtctccggatactccgtatcctattccacattttgtttgggaaacacatgccttgcatccggatgatcctttgagaagacaataatatccgggagagcattcacagattctattgtgagtcgtgttacacgatcgcgtcttccgttacaacttagacaagcgggtaaatgattattgcgagatgtgaaggtacccgaaccacacggcgtacatcgtgtgttagtcttgctatcgcataatctggaagcgtatgttcccggacacaaattatggcgtttgtattcgttgtctttacactttccatcggatggtgcatgcggtgctatatctcttccgtttattattatacatgagagaaacaatatatacgagtataatacggacttcatgatttaataatgtagtaatcgttgtcttgttcctgtttcctacttctccaatcatatagatattttctttctatcatggataatatttgtaatggttctttccgtacaacatactgtttagatgatattgcgcataatttccggaggcaaatacgatagtctagattgaccgatggtagactctaatttattgagtgctttgtcgacgagtttacttttacgctccatcgatagatggcactgttctatgagatcgtcgtacatgggaaatgaaatgtgactgtctgaatgtatggctttaagatagctgtgataccgtatacaggtcggtgtcggagattcgaatctctttgaggcgacttatgtcacgatgatggaatctatcttatcgaatgatatatttttcataaatacacttttatagtcctcgtttaaacagaatttactatgtagttccgcgaatgactcgtcccttaataggcagtaggctagtatcttttttacgtagtaatcgtcgtagggagagacatcttgtagaacaacgatttcgttttgttttctcttctgtaactgcttttctggatggccgtattgattatcgagcgtgatactcgctccatattccaataaccgctttgcaaattgtatattattgacatcgaccgcgtaatatagtagagttatcgatcatatctatatcatccatgtacttgcttagtatatcaaatacatctatcagtatggtttcataacagtgatacccgcaattattaaatctcgataatatcagaccgtacatacatagacggccattgttcgatacgtgatttacagccgcgtgtccatattttccacgataaaccttacgacgtttacatcgacgagattattattaacaaagtagtcgtgtagaggatagttgttgtccgttatctaacatgcatcgaacgaccatatcgccgtaatgtaagtagtttatcagtatggcttgtacgatggattcatcctgttgtctaaatctctttagaatgttatcgatgatgtagtggttatattctctggaatcgtacgaagtaatactacgcattacgtcgacaagagtatgacgtctctcaataagaagattaacgatttccatgtctacattatatggggttactctaaatcgcttgtttagataatacgcctctaatatagggctgacgtcgtatactctacacgtgtccacatcctttattaataataatttaacaatctctatatctatggttgagaaagaccagtagtattggatgggtaaagatcctccttcgtctctgccatggatggaaacattgttatcgatcaaacatttaattacatccttggatagagattgagattctctatgagacgatatatagtaatgaagagagttcttacacatatcactgtcgtacatacaggtacgaaatacgtaaccggtgctgtaacattctgatttaagaagccatagcaatacttctggtctcggattaggcgtcgttacgtatatatccaccaatccgagaccattgattgcataattcgtattcttggacggacgtatccgtttatccacaattaggtattttagcagacgtaagtcgatattatccgaatacagatcgaaatcatttatattcgacttgagttcgttagaggaatttgaatagctggatatcagtagatgcacaatctgagattttacgtatctatgcttactgtatactcctagcggagttaatccttcgttgtttctacaaagtctctcgactccgcgagagaacaatcttaatgtctgtatcgcatttattggagacgtaacaatgtagcgcattgtttcctcgtctatctatatgttttgataagttgtgacacgtttcaatttctagttttatttttttgtacgtcacatcttcatccagtagacgacatagaatagtgcactctctaccacaataatccatagctattctggtgctaattattcctatttcacgaaggcaatcattcctcataagatgataaaaagtgtagtggagatttagtatttagcagtgcggatatgatccaagagggtgagatagtcgttctcgttcagaatctttcgcagcataagtagtatgtcgatatacttatcgttgaagactctttataaaagtctatttgtttatatttattgcggatagcagtatttccctataaaaagtatacgtcctgtggtgtctttaatcatgtacatgaatggatggtttatgtagaccttcgtacgatataccatcgaaaagttaatcgtaaatactcctgtaacggccgatgcttctgtatactcctcattaacatctataaacgtcgtatgtagaaatttttctacagtgatagtttcattacacatcttgctaaaatctgcataatatccgaatatattagtaagtcctaaattttctaaaatcggtaccagattatacggttctgtcatttccactttaaactttggcatatacaagtctatacttttagtagataacataccacaccattttttaaatttttcatctgttatatttttttctatgttatatataccttctatgtcgtccggtagtataattaccatactagagtttccctcgtatggaatatcgataatagagaatcctccgaataattcattaatatgtacatattgcaagttattctcggtacccaccatcatatcaacgctggtaactatattcttagaaatataaaacttgtctgtatatgtaagatgtttagaaaatggatatttccacattgctttaaaatggacggcgctaacaactgtcatacgagtattaatggatagcggactagtcaataaggaattaattttaccatttgtcattgtcttaacccattcgttgattagttcctttgtttggttagcattattaaagtttacagtttgaaaatcgtcttttattttttgtaggaaggaggcgtggaactcgatactatcgctaccgtatattttatttgcggtagctagtgtcgcacaatacggaatatctacctccatgtcatcattattgtcatcgggtgtattctcattcatattctctatatattttgatagttgttcagctgtagaaccagctgctccatgatttagaatagataaagtagataaaatggaaactggagaaatcaaaacattttcatcagggtgttttaagattagttctttaaagatatccatggtatagacctaacgataacgatatatatcataaataaataatgttaaatttcaatttatgtttgtaccccgtattcatacttaacaaattggtattgcgtacacaatcaatcatattacataccattaataatgcaagcataaaaaattgttagtagatgtttctaaatataggttccgtaagcaaagaatataagaatgaagcggtaatgataaaatcaatcgttatctaaaatgatcatactcatttattttattctattatattaacacatacatttttaacagcaacacattcaatattgtattgttatttttatattatttacacaattaacaatatattattagtttatattactgaattaataatataaaattcccaatcttgtcataaacacacactgagaaacagcataaacacagaatccatcaaaaatgttgataaattatctgatgttgttgttcgctgctatgataatcagatcattcgccgatagtggtaacgctatcgaaacgacattgccagaaattacaaacgctacaacagatattccagctatcagattatgcggtccagagggagatggatattgtttacacggtgactgtatccacgctagagatattgacggtatgtattgtagatgctctcatggttatacaggcattagatgtcagcatgtagtattagtagactatcaacgttcagaaaacccaaacactacaacgtcatatatcccatctcccggtattatgcttgtattagtaggcattattatgtgttgtctattatctgtttataggttcactcgacgaactaaactacctatacaagatatggttgtgccataatttttataaatttttttatgagtatttttacaaaaatgtataaagtgtatgtcttatgtatatttataaaaatgctaagtatgcgatgtatctatgttatttgtatttatctaaacaatacctctacctctagatattatacaaaaattttttatttcggcatattaaagtaaaatctagttaccttgaaaatgaatacagtgggtggttccgtatcaccagtaagaacataatagtcaaatacagtatccgattgagattttgcatacaatactagtctagaaagaaatttgtaatcatcttctgtgacgggagtccatatatctgtatcatcgtctagtttatcagtgtcccatgctatattcctgttatcatcattagttaatgaaaataactctcgtgcttcagaaaagtcaaatattgtatccatacatacatctccaaaactatcgcttatacgtttatctttaacgatacctatacctagatggttatttactaacagacattttccagatctattgactataactcctatagtttccacatcaaccaagtaatgatcatctattgttatataacaataacataactcttttccatttttatcagtatgtatatctatatcaacgtcgtcgttgtagtgaatagtagtcattgatctattatatgaaacggatatgtctagaacggcaattgttttacgtccagttaacactttcgttgatttaaagtctagagtctttgcaaacataatatccttatccgactttatatttcctgtagggtggtataattttattttgcctccacatatcggtgtttccaaatatattactagacaatattccatatagttattagttaagggtacccaattagaacacgtacgcttattatcatcatttggatcgtatttcataaaagttattgtgttatcgatgtcaacacattctacattttttaatcgtctatatagtatttttctgatattttctataatatcagaattgtcttccatcggaagttgtatactatcggaatcagttacatgtttaaataattctctgatgtcattccttatacaatcaaattcattattaaacagtttaatagtctgtagacctttatcgtcgtaaatatccattgtcttattagttacgcttatttttatgtgtttttacgttgctttattatattttataagaatgattgtttgacgaatcacgagaactattaagacacattattaggtatatattataaaaaagtttttgattacgatgttataagaggaaagaggacacattaacatcatacatcaattaactacattcttataacatcgtaatcaaaagaattgcaattttgatgtataacaactgtcaatgggttatggaattgtatattacatattatacggtatgttggtaacgacaaataccggtcggtaattgtctgccggtgtaatagaattatatatatctatctattacaccggccttgtatacataataataagttgtggtagtatgatctccatatttataatttaggactttgtattcagtatttttggaatcataaaaaataaaaaaaagttttactaatttaaaatttaaaaagtatttacatttttttcactgtttagtcgcggatatggaattcgatcctgccaaaatcaatacatcatctatagatcatgtaacaatattacaatacatagatgaaccaaatgatataagactaacagtatgcattatccgaaatattatatcaatatcacaaaaataaatacacatttggctaatcaatttcgggcttggaaaaaacgtatcgccggaagggactatatgactaacttatctagagatacaggaatacaacaatcaaaacttactgaaactatacgtaactgtcaaaaaaatagaaacatatatggtctatatatacactacaatttagttattaattggataaccgatgtgattatcaatcaatattaagagggttggtaaattggtacatagctaataatacctatactccaaatacacccaataatacaacaaccatttctgagttggatatcatcaaaatactaaataaatacgaggacgtgtatagagtaagtaaagaaaaagaatgtggaatttgctatgaagttgtttactcaaaacgatagatactttggtttattggattcgtgtactcatatattttgcataacatgcatcaatatatggcatagaacacgaagagaaaccggtgcgtcggataattgtcctatatgccgtacccgttttagaaacataacaatgagcaagttctataagctagttaactaataaataaaaagtttaatttgttgacgacgtatgtcgttattttttctcgtataaaagattaatttgattctaatataatctttagtattggataaatatcaattcaaattaattccattagattatatcataaataaaaatagtagcacacaactacttcagcaaacattctttttataaatgccatctagcgtagcgaggacacaagtgaacctataattatcaaatttattagtatcagtcacatgaaggactttacgtagagtgacgattccactatctgtggtacgaacggtttcatcttctttgatgccatcacccagatgttctataaacttggtatcctcgtccgatttcatatcctttgccaaccaatacatatagctaaactcaggcatatgttccacacatcctgaacaatgaaattctccagaagatgttacaatgtctagatttggacatttggtttcaaccgcgttaacatatgagtgaacacacccatacatgaaagcgatgagaaataggattctcatcttgccaaaatatcactagaaaaaatttatttatcagttttaaaggtataaaaaatacttattgttgctcgaatattttgtatttgatggtatacggaagattagaaatgtaggtattatcatcaactgattctatggttttatgtattctatcatgtttcactattgcgttggaaataatatcatatgcttccacatatattttattttgttttaactcataatactcacgtaattctggattattggcatatctatgaataattttagctccatgatcagtaaatattaatgagaacatagtattaccacctaccattatttttttcatctcattcaattcttaattgcaaagatctatataatcattatagcgttgacttatggactctggaatcttagacgatgtacagtcatctataatcatggcatatttaatacattgttttatagcatagtcgttatctacgatgttagatatttctctcaatgaatcaatcacacaatctaatgtaggtttatgacataatagcattttcagcagttcaatgtttttagattcgttgatggcaatggctatacatgtatatccgttatttgatctaatgttgacatctgaaccggattctagcagtaaagatactagagattgtttattatatctaacagccttgtgaagaagtgtttctcctcgtttgtcaatcatgttaatgtctttaagataaggtaggcaaatgtttatagtactaagaattgggcaagcataagacatgtcacaaagacccttttttgtatgtataagtgtaaaaattataacatccatagttggatttacataggtgtccaatcgggatctctccatcatcgagataattgatggcatctcccttccttttttagtagatatttcatcgtgtaagaatcaatattaatatttctaaagtatccgtgtatagcctctttatttaccacagctccatattccactagagggatatcgccgaatgtcatatactcaattagtatatgttggaggacatccgagttcattgttttcaatatcaaagagatggtttccttatcatttctccatagtggtacaatactacacattattccgtgcggctttccattttccaaaaacaatttgaccaaatctaaatctacatctttattgtatctataatcactatttagataatcagccataattcctcgagtgcaacatgttagatcgtctatatatgaataagcagtgttatctattcctttcattaacaatttaacgatgtctatatctatatgagatgacttaatataatattgaagagctgtacaatagtttttatctataaaagacggcttgattccgtgattaattagacatttaacaacttccggacgcacatatgctctcgtatccgactctgaatacagatgagagatgatatacagatgcaatacggtaccgcaatttcgtagttgataatcatcatacgcgtatcagtactcgtcctcataaagaacactgcagccattttctatgaacaaatcaataattttagaaacaggatcattgtcattacataattttctataactgaacgatggttttcacatttaacactcaagtcaaatccatgttctaccaacacctttatcaagtcaacgtctacatttttggatttcatatagctgaatatattaaagttatttatgttgctaaatccagtggcttctagtagagccatcgctatatccttattaactttaacatgtctactatttgtgtattcttctaatggggtaagctgtctccaatttttgcgtaatggattagtgccactgtctagtagtagtttgacgacctcgacattattacaatgctcattaaaaaggtatgcgtgtaaagcattattcttgaattggttcctggtatcattaggatctctgtctttcaacatctgtttaagttcatcaagagccacctcctcattttccaaatagtcaaacattttgactgaatgagctactgtgaactctatacacccacacaactaatgtcattaaatatcatgtcaaaaacttgtacaattattaataaaaataatttagtgtttaaattttaccagttccagattttacacctccgttaatacctccattaaccccactggacgatcctcctccccacattccaccgccaccagatgtataagttttagatcctttattactaccatcatgtccatggataaagacactccacatgccgccactaccccctttagaagacatattaataagacttaaggacaagtttaacaataaaattaatcacgagtaccctactaccaacctacactattatatgattatagtttctatttttacagtaccttgactaaagtttctagtcacaagagcaatactaccaacctacactattatatgattatagtttctatttttataggaacgcgtacgagaaaatcaaatgtctaatttctaacggtagtgttgataaacgattgttatccgcggatacctcctctatcatgtcgtctattttcttactttgttctattaacttattagcattatatattatttgattataaaacttatattgcttattagcccaatctgtaaatatcggattattaacatatcgtttctttgtaggtttatttaacatgtacatcactgtaagcatgtccttaccatttattttaatttgacgcatatccgcaatttctttttcgcagtcggttataaattctatatatgatggatacatgctacatgtgtacttataatcgactaatatgaagtacttgatacatattttcagtaacgatttattattaccacctatgaataagtacctgtgatcgtctaggtaatcaactgttttcttaatacattcgatggttggtaatttactcagaataatttccaatatcttaatatataattctgctatttctgggatatatttatctgccagtataacacaaatagtaatacatgtaaacccatattttgttattatattaatgtctgcgccattatctattaaccattctactaggctgacactatgcgactcaatacaatgataaagtatactacatccatgtttatctattttgtttatatcatcaatatacggcttacaaagttttagtatcgataacacatccaactcacgcatagagaaggtagggaataatggcataatatttattaggttatcatcattgtcattatctacaactaagtttccattttttaaaatatactcgacaactttaggatctctattgccaaatttttgaaaatatttatttatatgcttaaatctatataatgtagctccttcatcaatcatacatttaataacattgatgtatactgtatgataagatacatattctaacaatagatcttgtatagaatctgtatatcttttaagaattgtggatattaggatattattacataaactattacacaattctaaaatataaaacgtatcacggtcgaataatagttgatcaactatataattatcgattttgtgatttttcttcctaaactgtttacgtaaatagttagatagaatattcattagttcatgaccactatagttactatcgaataacgcgtcaaatatttcccgtttaatatcgcatttgtcaagataataatagagtgtggtatgttcacgataagtataataacgcatctctttttcgtgtgaaattaaatagtttattacgtccaaagatgtagcataaccatcttgtgacctagtaataatataataatagagaactgttttacccattctatcatcataatcagtggtgtagtcgtaatcgtaatcgtctaattcatcatcccaattataatattcaccagcacgtctaatctgttctattttgatcttgtatccatactgtatgttgctacatgtaggtattcctttatccaataatagtttaaacacatctacattgggatttgatgttgtagcgtatttttctacaatattaataccatttttgatactatttatttctatacctttcgaaattagtaatttcaataagtctatattgatgttatcagaacatagatattcgaatatatcaaaatcattgatatttttatagtcgactgacgacaataacaaaatcacaacatcgtttttgatattattatttttcttggtaacgtatgcctttaatggagtttcaccatcatactcatataatggatttgcaccactttctatcaatgattgtgcactgctggcatcgatgttaaatgttttacaactatcatagagtatcttatcgttaaccatgattggttgttgatgctatcgcattttttggtttctttcatttcagttatgtatggatttagcacgtttgggaagcatgagctcatatgatttcagtactgtagtgtcagtactattagtttcaataagatcaatctctagatctatagaatcaaaacacgataggtcagaagataatgaatatctgtaggcttcttgttgtactgtaacttctggttttgttagatggttgcatcgtgctttaacgtcaatggtacaaattttatcctcgctttgtgtatcatattcgtccctactataaaattgtatattcagattatcatgcgatgtgtatacgctaacggtatcaataaacggagcacaccatttagtcataaccgtaatccaaaaatttttaaagtatatcttaacgaaagaagttgtgtcattgtctacggtgtatggtactagatcctcataagtgtatatatctagagtaatgtttaatttattaaatggttgataatatggatcctcgtgacaatttccgaagatggaaataagacataaacacgcaataaatctaattgcggacatggttactccttaaaaaaatacgaataatcaccttggctatttagtaagtgtcatttaacactatactcatattaatccatggactcataatctctatacgggattaacggatgttctatatacggggatgagtagttctcttctttaactttatactttttactaatcatatttagactgatgtatgggtaatagtgtttgaagagctcgttctcatcatcagaataaatcaatatctctgtttttttgttatacagatgtattacagcctcatatattacgtaatagaacgtgtcatctaccttattaactttcaccgcatagttgtttgcaaatacggttaatcctttgacctcgtcgatttccgaccaatctgggcgtataatgaatctaaactttaattgcttgtaatcattcgaaataatttttagtttgcatccgtagttatcccctttatgtaactgtaaatttctcaacgcgatatctccattaataatgatgtcgaattcgtgctgtatacccatactgaatggatgaacgaataccgacggcgttaatagtaatttactttttcatctttacatattgggtactagttttactatcataagtttataaattccacaagctactatggaataagccaaccatcttagtataccacacatgtcttaaagtttattaattaattacatgttgttttatatatatcgctacgaatttaaagagaaattagtttaggaagaaaaattatctatctacatcatcacgtctctgtattctacgatagagtgctactttaagatgcgacagatccgtgtcatcaaatatatactccattaaaatgattattccggcagcgaacttgatattggatatatcacaacctttgttaatatctacgacaatagacagcagtcccatggttccataaacagtgagtttatctttctttgaagagatattttgtagagatcttataaaactgtcgaatgacatcgcatttatatctttagctaaatcgtatatgttaccatcgtaatatctaaccgcgtctatcttaaacgtttccatcgctttaaagacgtttccgatagatggtctcatttcatcagtcatactgagccaacaaatataatcgtgtataacatctttgatagaatcagactctaaagaaaacgaatcggctttattatacgcattcatgataaacttaatgaaaaatgtttttcgttgtttaagttggatgaatagtatgtcttaataattgttattatttcattaattaatatttagtaacgagtacactctataaaaacgagaatgacataactaatcataactagttatcaaagtgtctaggacgcgtaattttcatatggtatagatcctgtaagcattgtctgtattctggagctattttctctatcgcattagtgagttcagaatatgttataaatttaaatcgaataacgaacataactttagtaaagtcgtctatattaactcttttattttctagccatcgtaataccatgtttaagatagtatattctctagttactacgatctcatcgttgtctagaatatcacatactgaatctacatccaattttagaaattggtctgtgttacatatctcttctatattattgttgatgtattgtcgtagaaaactattacgtagaccattttctttataaaacgaatatatagtactccaattatctttaccgatatatttgcacacataatccattctctcaatcactacatctttaagattttcgttgttaagatatttggctaaactatataattctattagatcatcaacagaatcagtatatatttttctagatccaaagacgaactctttggcgtcctctataatattcccagaaaagatattttcgtgttttagtttatcgagatctgatctgttcatatacgccatgattgtacggtacgttatgataaccgcataaaataaaaatccattttcatttttaaccaatactattcataattgagattgatgtaatactttgttactttgaacgtaaagacagtacacggatccgtatctccaacaagcacgtagtaatcaaatttggtgttgttaaacttcgcaatattcatcaatttagatagaaacttatactcatcatctgttttaggaatccatgtattattaccactttccaacttatcattatcccaggctatgtttcgtccatcatcgttgcgcagagtgaataattcttttgtattcggtagttcaaatatatgatccatgcatagatcggcaaagctattgtagatgtgatttttcctaaatctaatataaaactcgtttactagcaaacactttcctgatttatcgaccaagacacatatggtttctaaatctatcaagtggtggggatccatagttatgacgcagtaacatatattattacattcttgactgtcgctaatatctaaatatttattgttatcgtattggattctgcatatagatggcttgtatgtcaaagatatagaacacataaccaatttatagtcgcgctttacattctcgaatctaaagttaagagatttagaaaacattatatcctcggatgatgttatcactgtttctggagtaggatatattaaagtctttacagatttcgtccgattcaaataaatcactaaataatatcccacattatcatctgttagagtagtatcattaaatctattatattttatgaaagatatatcactgctcacctctatatttcgtacatttttaaactgtttgtataatatctctctgatacaatcagatatatctattgtgtcggtagacgataccgttacatttgaattaatggtgttccattttacaacttttaacaagttgaccaattcatttctaatagtatcaaactctccatgattaaatattttaatagtatccattttatatcactacggacacaaagtagctgacataaaccattgtataatttttatgttttatgtttattagcgtacacattttggaagttccggcttccatgtatttcctggagagcaagtagatgatgaggaaccagatagtttatatccgtacttgcacttaaagtctacattgtcgttgtatgagtatgatcttttaaacccgctagacaagtatccgtttgatattgtaggatgtggacatttaacaatctgacacgtgggtggatcggaccattctcctcctgaacacaggacactagagttaccaatcaacgaatatccactattgcaactataagttacaacgctcccatcggtataaaaatcctcgtatccgttatgtcttccgttggatatagatggaggggattggcatttaacagattcacaaataggtgcctcgggattccataccatagatccagtagatcctaattcacaatacgatttagattcaccgatcaactgatatccgctattacaagagtacgttatactagagccaaagtctactccaccaatatcaagttggccattatcgatatctcgaggcgatgggcatctccgtttaatacattgattaaagagtgtccatccagtacctgtacatttagcatatataggtcccattttttgctttctgtatccaggtagacatagatattctatagtgtctcctatgttgtaattagcattagcatcagtctccacactattcttaaatttcatattaatgggtcgtgacggaatagtacagcatgatagaacgcatcctattcccaacaatgtcaggaacgtcacgctctccaccttcatatttatttatccgtaaaaatgttatcctggacatcgtacaaataataaaaagcccatatatgttcgctattgtagaaattgtttttcacagttgctcaaaaacgatggcagtgacttatgagttacgttacactttggagtctcatctttagtaaacatatcataatattcgatattacgagttgacatatcgaacaaattccaagtatttgattttggataatattcgtattttgcatctgctataattaagatataatcaccgcaagaacacacgaacatctttcctacatggttaaagtacatgtacaattctatccatttgtcttccttaactatatatttgtatagataattacgagtctcgtgagtaattccagtaattacatagatgtcgccgtcgtactctacagcataaactatactatgatgtctaggcatgggagacttttttatccaacgatttttagtgaaacattccacatcgtttaatactacatatttctcatacgtggtataaactccacccattacatatatatcatcgtttacgaataccgacgcgcctgaatatctaggagtaattaagtttggaagtcttatccatttcgaagtgccgtgtttcaaatattctgccacacccgttgaaatagaaaattctaatcctcctattacatataactttccatcgttaacacaagtactaacttctgattttaacgacgacatattagtaaccgttttccattttttcgttttaagatctacccgcgatacggaataaacatgtctattgttaatcatgccgccaataatgtatagacaattatgtaaaacatttgcattatagaattgtctatctgtattaccgactatcgtccaatattctgttctaggagagtaatgggttattgtggatatataatcagagtttttaatgactactatattatgttttataccatttcgtgtcactggctttgtagatttggatatagttaatcccaacaatgatatagcattgcgcatagtattagtcataaacttgggatgtaaaatgttgatgatatctacatcgtttggatttttatgtatccactttaataatatcatagctgtaacatcctcatgatttacgttaacgtcttcgtgggataagatagttgtcagttcatcctttgataattttccaaattctggatcggatgtcaccgcagtaatattgttgattatttctgacatcgacgcattatatagttttttaattccatatcttttagaaaagttaaacatccttatacaatttgtgaaattaatattatgaatcatagtttttacacatagatctactacaggcggaacatcaattattatggcagcaactagtatcatttctacattgtttatggtgatgtttatcttcttccagcgcatatagtctaatagcgattcaaacgcgtgatagtttataccattcaatataatcgcttcatcctttagatggtgatcctgaatgcgtttaaaaaaattatacggagacgccgtaataatttccttattcacttgtataatttccccattgatagaaaatattacgctttccattcttaaagtactataagtaattatagtataatgtaaacgtttatatattcaatatttttataaaaatcattttgacattaattcctttttaaatttccgtctatcatctatagaaacgtattctatgaatttataaaatgcttttacgtgtcctatcgtaggcgatagaaccgctaaaaagcctatcgaatttctacaaaagaatctgttatatggtatagggagagtataaaacattaaatgtccgtacttattaaagtattcagtagccaatcctaactctttcgaatacttattaatggctcttgttctgtacgaatctatttttttgaacaacggacctagtggtatatcttgttctatgtatctaaaataatgtctgactagatccgttagtttaatatccgcagtcatcttgtctagaatggcaaatctaactgcgggtttaggctttagtttagtttctatatctacatctatgtctttatctaacaccaaaaatataatagctaatattttattacaatcatccggatattcttctacgatctcactaactaatgtttctttggttatactagtatagtcactatcggacaaataaagaaaatcagatgatcgatgaataatacatttaaattcatcatctgtaagatttttgagatgtctcattagaatattattagggttagtactcattatcattcggcagctattacttattttattatttttcaccatatagatcaatcattagatcatcaaaatatgtttcaatcatcctaaagagtatggtgaatgactcttcccatctaatttctgaacgttcaccaatgtctctagccactttggcactaatagcgatcattcgcttagcgtcttctatattattaactggttgatttaatctatctagcaatggaccgtcggacagcgtcattctcatgttcttaatcaatgtacatacatcgccgtcatctaccaattcatccaacaacataagctttttaaaatcatcattataataggtttgatcgttgtcatttctccaaagaatatatctaataagtagagtcctcatgcttagttaacaactattttttatgttaaatcaattagtacaccgctatgtttaatacttattcatattttagtttttaggattgagaatcaatacaaaaattaatgcatcattaattttagaaatacttagtttccacgtagtcaatgaaacatttgaactcatcgtacaggacgttctcgtacaggacgtaactataaaccggtttatatttgttcaagatagatacaaatccgataactttttttacgaattctacgggatccactttaaaagtgtcataccgggttctttttatttttttaaacagatcaatggtgtgatgttgattaggtcttttacgaatttgatatagaatagcgtttacatattctccataatggtcaatcgccatttgttcgtatgtcataaattctttaattatatgacactgtgtattatttagttcatccttgttcattgttaggaatctatccaaaatggcaattatactagaactataggtgcgttgtatacacatattgatgtgtctgtttatacaatccatgatatttggatccatgctactaccttcgggtaaaattgtagcatcatataccatttctagtactttaggttcattattatccattgcagaggacgtcatgatcgaatcataaaaaaatatattatttttatgttattttgttaaaaataatcatcgaatacttcgtaagatactccttcatgaacataatcagttacaaaacgtttatatgaagtaaagtatctacgatttttacaaaagtccggatgcataagtacaaagtacgcgataaacggaataataatagatttatctagtctatctttttctatagctttcatagttagatacatggtctcagaagtaggattatgtaacatcagcttcgataaaatgactgggttatttagtcttacacattcgctcatacatgtatgaccgttaactacagagtctacactaaaatgattgaacaatagatagtctaccattgtttcgtattcagatagtacagcgtagtacatggcatcttcacaaattatatcattgtctaatagatatttgacgcatcttatggatcccacttcaacagccatcttaaaatcatattgctttcctttatcattaataatttctagaacatcatctctatcataaaagatacaaatattaactgtttgatccgtaataacattgctagtcaatagcaatttgttaataagatgcgctgggctcaatgtcttaataagaagtgtaagaggactatctccgaatttgttttgtttattaacatccgttgatggaagtaaaagatctataatgtctacattcttgactgttttagagcatacaatatggagaggtgtatttccatcatgatctggttttgagggactaattcctagtttcatcatccatgagattgtagaagcttttggattgtctgacataagatgtctatgaatatgatttttgccaaatttatccactatcctggcttcgaatccgatggacattatttttttaaacactctttctgaaggatctgtacacgccaacaacggaccacatccttcttcatcaaccgagttgttaatcttggctccatactgtaccaataaatttattctctctatgacttcatcatctgttcccgagagataatatagaggtgttttatgctgtttatcacacgcgtttggatctgcgccgtgcgtcagcagcatcgcgactattctattattattaattttagaagctatatgcaatggataatttccatcatcatccgtctcatttggagagtatcctctatgaagaagttcttcgacaaatcgttcatctagtcctttaattccacaatacgcatgtagaatgtgataattatttccagaaggttcgatagcttgtagcatattcctaaatacatctaaatttttactattatatttggcataaagagatagataatactcggccgacataatgttgtccattgtagtataaaaattaatatttctatttctatttctgtatatttgcaacaatttactctctataacaaatatcataacttagtttttttatgtcaagaaggcactggtttagttcatctataaatgtcacgccataactaccacgcatgccatactcagaattatgataaagatatttatccttggggtgtaggtaatggggattaatctttgttggatcagtctctaagttaacacatgtcacacatgatccatttatagttatatcacacgatgatgatttatgaattgattccggaagatcgctatcgtattttgtggttccacaattcatttccatacatgttattgtcacactaatattatgatgaactttatctagccgctgagtggtaaacaacagaacagatagtttattatctttaccaacaccctcagccgctgccacaaatctctgatccgtatccatgatggtcatgtttatttctagtccgtatccagtcaacactatgttagcatttctgtcgatatagctttcactcatatgacactcaccaataatagtagaattaatgtcgtaatttacaccaatagtgagttcggcggcaaagtaccaataccggtaatcttgtcgaggaggacatatagtattcttgtattctaccgaatacccgagagatgcgatacaaaagagcaagactaatttgtaaaccatcttactcaaaatatgtaacaatagtacgatgcaatgagtaagacaataggaaatctatcttatatacacataattattctatcaattttaccaattagttagtgtaatgttaacaaaaatgtgggagaatctaattagtttttctttacacaattgacgtacatgagtctgagttccttgtttttgctaattatttcatccaatttattattcttgacgatatcgagatcttttgtataggagtcaaacttgtattcaacatgcttttctataatcattttagctatttcggcatcatccaatagtacattttccagattagcagaatagatattaatgtcgtatttgaacagagcctgtaacatctcaatgtctttattatctatagccaatttaatgtccggaatgaagagaagggaattattggtgtttgtcgacgtcatatagtcgagcaagagaatcatcatatccacgtgtccattttttatagtgatgtgaatacaactaaggagaatagccagatcaaaagtagatggtatctctgaaagaaagtaggaaacaatacttacatcattaagcatgacggcatgataaaatgaagttttccatccagttttcccatagaacatcagtctccaatttttcttaacaaacagttttaccgtttgcatgttaccactatcaaccgcataatacaatgcggtgtttcccttgtcatcaaattgtgaatcatccagtccactgaatagcaaaatctttactattttggtatcttccaatgtggctgcctgatgtaatggaaattcattctctagaagatttttcaatgctccagcgttcaacaacgtacatactagacgcacgttattatcagctattgcataatacaaggcactatgtccatggacatccgccttaaatgtatctttactagagagaaagcttttcagctgcttagacttccaagtattaattcgtgacagatccatgtctgaaacgagacgctaattagtgtatattttttcattttttataattttgtcatattgcaccagaattaataatatctttaatagatctgattagtagatacatggctatcgcaaaacaacatatacacatttaataaaaataatatttattaagaaaattcagatttcacgtacccatcaatataaataaaataatgattccttacaccgtacccatattaaggagattccaccttacccataaacaatataaatccagtaatatcatgtctgatgatgaacacaaatggtgtattaaattccagtttttcaggagatgatctcgccgtagctaccataatagtagatgcctctgctacagttccttgttcgtcgacatctatctttgcattctgaaacattttataaatatataatgggtccctagtcatatgtttaaacgacgcattatctggattaaacatactaggagccatcatttcggctatcgacttaatatccctcttattttcgatagaaaatttagggagtttaagattgtacactttattccctaattgagacgaccaatagtctaattttgcagccgtgatagaatctgtgaaatgggtcatattatcacctattgccaggtacatactaatattagcatccttatacggaaggcgtaccatgtcatattctttgtcatcgattgtgattgtatttccttgcaatttagtaactacgttcatcatgggaaccgttttcgtaccgtacttattagtaaaactagcattgcgtgttttagtgatatcaaacggatattgccatatacctttaaaatatatagtattaatgattgcccatagagtattattgtcgagcatattagaatctactacattagacataccggatctacgttctactatagaattaattttattaaccgcatctcgtctaaagtttaatctatataggccgaatctatgatattgttgataatacgacggtttaatgcacacagtattatctacgaaactttgataagttagatcagtgtacgtatatttagatgttttcagcttagctaatcctgatattaattctgtaaatgctggacccagatctctttttctcaaatccatagtcttcaataattctattctagtattacctgatgcaggcaatagcgacataaacatagaaaacgaataaccaaacggtgagaagacaatattatcatcttgaatatttttatacgctactataccggcattggtaaatccttgtagacgataggcggacgctgaacacgctaacgatagtatcaataacgcaatcatgattttatggtattaataattaaccttatttttatgttcggtataaaaaaattattgatgtctacacatccttttgtaattgacatctatatatccttttgtataatcaactctaatcactttaacttttacagttttccctaccagtttatccctatattcaacatatctatccatatgcatcttaacactctctgccaagatagcttcagagtgaggatagtcaaaaagataaatatatagagcataatcattctcgtatactctgccctttattacatcacccgcattgggcaacgaataacaaaatgcaagcatcttgttaacgggctcgtaaattgggataaaaattatgtttttattgtcttatatctattttattcaagagaatattcaggaatttctttttccggttgtatctcgtcgcagtatatatcatttgtacattgtttcatattttttaatagtttacaccttttagtaggactagtatcgtacaattcatagctgtattttgaattccaatcacgcataaaaatatcttccaattgttgacgaagacctaatccatcatccggtgtaatattaatagatgctccacatgtatccgtaaagtaatttcctgtccaatttgaggtacctatataggccgttttatcggttaccatatatttggcatggtttaccctagaatacggaatgggaggatcagcatctggtacaataaatagctttacttctatatttatgtttttagattttagcatagcgatagatcttaaaaagtttctcatgataaacgaagatcgttgccagcaactaatcaatagcttaacggatacttgtctgtctatagcggatcttcttaattcatcttctatataaggccaaaacaaaattttacccgccttcgaataaataatagggataaagttcataacagatacataaacgaatttactcgcatttctaatacatgacaataaagcggttaaatcattggttctttccatagtacatagttgttgcggtgcagaagcaataaatacagagtgtggaacgccgcttacgttaatactaagaggatgatctgtattataatacgacggataaaagtttttccaattatatggtagattgttaactccaagataccagtatacctcaaaaatttgagtgagatccgctgccaagttcctattattgaagatcgcaatacccaattccttgacctgagttagtgatctccaatccatgttagcgcttcctaaataaatatgtgtattatcagatatccaaaattttgtatgaagaactcctcctaggatatttgtaatatctatgtatcgtacttcaactccggccatttgtagtctttcaacatcctttaatggtttgttagatttattaacggctactctaactcgtactcctcttttgggtaattgtacaatctcgtttaatattatcgtgccgaaattcgtacccacttcatccgataaactccaataaaaagatgatatatctagtgtttttgtggtattggatagaatttccctccacatgttaaatgtagacaaatatactttatcaaattgcatacctataggaatagtttctgtaatcactgcgattgtattatccggattcattttatttgttaaaagaataatcctatatcacttcactctattaaaaatccaagtttctatttctttcatgactgattttttaacttcatccgtttccttatgaagatgatgtttggcaccttcataaatttttatttctctattacaatttgcatgttgcatgaaataatatgcacctaaaacatcgctaatcttattgtttgttccctggagtatgagagtcggggggtgttaatcttggaaattatttttctaaccttgttggtagccttcaagacctgactagcaaatccagccttaattttttcatgattgactaatgggtcgtattggtatttataaactttatccatatctctagatactgattctggacatagctttccgactggcgcatttggtgtgatggttcccataagtttggcagctagcagattcagtcttgaaacagcatctgcattaactagaggagacattagaatcattgctgtaaacaagtttggattatcgtaagaggctagctcccatggaatgacccaataagtagatttaatagttaccacgtgctgtaccaaagtcatcaatcatcattttttcaccattacttcttccatgtccaatatgatcatgtgagaatactaaaattcctaacgatgatatgttttcagctagttcgtcataacgtccagaatgtttaccagctccatgacttatgaatactaatgccttaggatatgtaataggtttccaatatttacaatatatgtaatcattgtccagattgaacatacagtttgcactcatgattcacgttatataactatcaatattaacagttcgtttgatgatcatattatttttatgttttattgataattgtaaaaacatacaattaaatcaatatagaggaaggagacggctactgtcttttgtaagatagtcatggcgactaaattagattatgaggatgctgttttttactttgtggatgatgataaaatatgtagtcgcgactccatcatcgatctaatagatgaatatattacgtggagaaatcatgttatagtgtttaacaaagatattaccagttgtggaagactgtacaaggaattgatgaagttcgatgatgtcgctatacggtactatggtattgataaaattaatgagattgtcgaagctatgagcgaaggagaccactacatcaattttacaaaagtccatgatcaggaaagtttattcgctaccataggaatatgtgctaaaatcactgaacattggggatacaaaaagatttcagaatctagattccaatcattgggaaacattacagatttgatgaccgacgataatataaacatcttgatactttttctagaaaaaaaattgaattgatgatataggggtcttcataacgcataattattacgttagcattctatatccgtgttaaaaaaaattatcctatcatgtatttgagagttttatatgtagcaaacatgatagctgtgatgccaataagctttagatattcacgcgtgctagtgttagggatggtattatctggtggtgaaatgtccgttatataatctacaaaacaatcatcgcatatagtatgcgatagtagagtaaacatttttatagtttttactggattcatacatcgtctacccaattcggttataaatgaaattgtcgccaatcttacacccaaccccttgttatccattagcatagtattaacttcgttatttatgtcataaactgtaaatgattttgtagatgccatatcatacatgatattcatgtccctattataatcattactaactttatcacaatatatgttgataatatctatatatgatctagtctttgtgggcaactgtctatacaagtcgtctaaacgttgtttactcatatagtatcgaacagccatcattacatggtcccgttccgttgatagataatcgagtatgttagtggacttgtcaaatctatataccatattttctggaagtggatatacatagtcgtgatcaacattattgctagcctcatcttctatatcctgtactataccattatctatatcatctacataatctatgatattattacacataaacatcgacaacatactattgtttattatctaagtcctgttgatccaaacccttgatctcctctatttgtactatctagagattgtacttcttccagttctggataatatatacgttgatagattagctgagctattctatctccagtatttacattaaacgtacattttccattattaataagaatgactcctatgtttcccctataatcttcgtctattacaccacctcctatatcaatgccttttagtgacagaccagacctaggagctattctaccatagcagaacttaggcatggacatactaatatctgtcttaattaactgtctttctcctggagggatagtataatcgtaagcgctatacaaatcatatccggcagcacccggcgattgcctagtaggagatttagctctgttagtttccttaacaaatctaactggtgagttaatattcatgttgaacataaaactaatattttatttcaaaattatttaccatcccatatattccatgaataagtgtgatgattgtacacttctatagtatctatatacgatccacgataaaatcctcctatcaatagcagtttattatccactatgatcaattctggattatccctcggataaataggatcatctatcagagtccatgtattgctggattcacaataaaattccgcatttctaccaaccaagaataaccttctaccgaacactaacgcgcatgatttataatgaggataataagtggatggtccaaactgccactgatcatgattgggtagcaaatattctgtagttgtatcagtttcagaatgtcctcccattacgtatataacattgtttatggatgccactgctggattacatctaggtttcagaagactcggcatattaacccaagcagcatccccgtggaaccaacgctcaacagatgtgggatttggtagacctcctactacgtataatttattgttagcgggtatcccgctagcatacagtctggggctattcatcggaggaattggaatccaattgtttgatatataatttacagctatagcattgttatgtatttcattgttcatccatccaccgatgagatatactacttctccaacatgagtacttgtacacatatggaatatatctataatttgatccatgttcataggatactctatgaatggatacttgtatgatttgcgtggttgtttatcacaatgaaatattttggtacagtctagtatccattttacattatttatacctctgggagaaagataatttgacctgattacatttttgataaggagtagcagatttcctaatttatttcttcgcctcatataccacttaatgacaaaatcaactacataatcctcatctggaacatttagttcatcgctttctagaataagtttcatagatagataatcaaaattgtctatgatgtcatcttccagttccaaaaagtgtttggcaataaagtttttagtatgacataagagattggatagtccgtattctatacccatcatgtaacactcgacacaatattcctttctaaaatctcgtaagataaagtttatacaagtgtagatgataaattctacagaggttaatatagaagcacgtaataaattgacgacgttatgactatctatatatacctttccagtatatgagtaaataactatagaagttaaactgtgaatgtcaaggtctagacaaacccttgtaactggatctttatttttcgtgtatttttgacgtaaatgtgtgcgaaagtaaggagataactttttcaatatcgtagaattgactattatattgcctcctatggcatcaataattgttttgaatttcttagtcatagacaatgctaatatattcttacagtacacagtattgacaaatatcggcatttatgtttctttaaaagtcaacatctagagaaaaatgattatctttttgagacataactcccattttttggtattcacccacacgtttttcgaaaaaattagtttttccttccaatgatatattttccatgaaatcaaacggattggtaacattataaatttttttaaatcccaattcagaaatcaatctatccgcgacgaattctatatatgttttcatcatttcacaattcattcctataagtttaactggaagagccgcagtaagaaattcttgttcaatggatactgcatctgttataatagatctaacggtttcttcactcggtggatgcaataaatgtttaaacatcaaacatgcgaaatcgcagtgcagaccctcgtctctactaattagttcgttggaaaacgtgagtccgggcattaggccacgctttttaagccaaaatatggaagcgaatgatccagaaaagaaaattccttctactgcagcaaaggcaataagtctctctccataaccggcgctgtcatgtatccacttttgagcccaatcggccttcttttttacacaaggcatcgtttctatggcattaaagagatagtttttttcattactatctttaacataagtatcgatcaaaagactatacatttccgaatgaatgttttcaatggccatctgaaatccgtagaaacatctagcctcggtaatctgtacttctgtacaaaatcgttccgccaaattttcattcactattccgtcactggctgcaaaaaacgccaatacatgttttataaaatatttttcgtctggtgttagtttattccaatcattgatatctttagatatatctacttcttccactgtccaaaatgatgcctctgcctttttatacatgttccagatgtcatgatattggattgggaaaataacaaatctatttggatttggtgcaaggatgggttccataactaaattaacaataacaataaattttttttcagttatctatatgcctgtacttggattttttgtacatcgatatcgccgcaatcactacaataattacaagtattattgatagcattgttattagtactatcataattaaattatctacattcatgggtgctgaataatcgttattatcatcattatcattttgtaattgtgacatcatactagataaatcgtttgcgagattgttgtgggaagcgggcatggaggatgcattatcattattatttaacgccttccatttggattcacaaatgttacgcacattcaacattttatggaaactataattttgtgaaaacaaataacaagaaaactcgtcatcgttcaaatttttaacgatagtaaaccgattaaacgtcgagctaatttctaacgctagcgactctgttggatatgggtttccagatatatatcttttcagttcccctacgtatctataatcatctgtaggaaatggaagatatttccatttatctactgttcctaatatcatatgtggtggtgtagtagaaccattaagcgcgaaagatgttatttcgcatcgtattttaacttcgcaataatttctggttagataacgcactctaccagtcaagtcaatgatattagcctttacagatatattcatagtagtcgtaacgatgactccatcttttagatgcgatactcctttgtatgtaccagaatcttcgtacctcaaactcgatatatttaaacaagttaatgagatattaacgcgttttatgaatgatgatatataaccagaagttttatcctcggtggctagcgctataaccttatcattataataccaactagtgtgattaatatgtgacacgtcagtgtgggtacaaatatgtacattatcgtctacgtcgtattcgatacatccgcatacagccaacaaatataaaatgacaaatactctaacgccgttcgtacccatcttgatgcggtttaataaatgttttgatttcaatttattgtaaaaaaagattcggttttatactgttcgatattctcattgcttatattttcatctatcatctccacacagtcaaatccgtggttagcatgcacctcatcaaccggtaaaagactatcggactcttctatcattataactctagaatatttaatttggtcattattaatcaagtcaattatcttatttttaacaaacgtgagtattttactcattttttataaaaacttttagaaatatacagactctatcgtgtgtctatatcttctttttatatccaatgtatttatgtctgatttttcttcatttatcatatataatggtccaaattctacacgtgcttcggattcatccagatcattaaggttcttataattgtaacatccttctcttccctcttctacatcttccttcttattcttattcttagcgtcacagaatctaccacagcaggatcccatgacgagcgtcatattaaactaatccattttcaattataatatatgattagtaatgaccattaaaataaaaaatattcttcataaccggcaagaaagtgaaaagttcacattgaaactatgtcagtagtatacatcatgaaatgatgatatatatatactctattttggtggaggattatatgatataattcgtggataatcatttttaagacacatttctttattcgtaaatcttttcacgttaaatgagtgtccatattttgcaatttcttcatatgatggcggtgtacgtggacgaggctgctcctgttcttgttgtggtcgccgactgtcgtgtctgcgtttagatccctccattatcgcgattgcgtagatggagtactattttataccttgtaattaaatttttttattaattaaacgtataaaaacgttccgtatctgtatttaagagccagatttcgtctaatagaacaaatagctacagtaaaaataactagaataattgctacacccactagaaaccacggatcgtaatacggcaatcggttttcgataataggtggaacgtatattttatttaaggacttaacaattgtctgtaaaccacaatttgcttccgcggatcctgtattaactatctgtaaaagcatatgttgaccgggcggagccgaacattctccgatatctaatttctgtatatctataatattattaacctccgcatacgcattacagttcttttctagcttggataccgcactaggtacatcgtctagatctattcctatttcctcagcgatagctcttctatccttttccggaagcaatgaaatcacttcaataaatgattcaaccatgagtgtgaaactaagtcgagaattactcatgcatttgttagttattcggagcgcgcaatttttaaactgtcctataacctctcctatatgaatagcacaagtgacattagtagggatagaatgttgagctaatttttgtaaataactatctataaaaagattatacaaagttttaaactctttagtttccgccatttatccagtctgagaaaatgtctctcataataaatttttccaagaaactaattgggtgaagaatggaaacctttaatctatatttatcacagtctgttttggtacacatgatgaattcttccaatgccgtactaaattcgatatctttttcgatttctggatatgtttttaataaagtatgaacaaagaaatggaaatcgtaataccagttatgtttaactttgaaattgttttttattttcttgttaatgattccagccacttgggaaaagtcaaagtcgtttaatgccgatttaatacgttcattaaaaacaaactttttatcctttagatgaattattattggttcattggaatcaaaaagtaagatattatcgggtttaagatctgcgtgtaaaaagttgtcgcaacagggtagttcgtagattttaatgtataacagagccatctgtaaaaagataaactttatgtattgtaccaaagatttaaatcctaatttgatagctaactcggtatctactttatctgccgaatacagtgctaggggaaaaattataatgtttcctctttcatattcgtagttagttctcttttcatgttcgaaaaagtgaaacatgcggttaaaatagtttataacattaatattactgttaataactgccggataaaagtgggatagtaatttcacgaatttgatactgtcctttctctcgttaaacgcctttaaaaaaactttagaagaatatctcaatgagagttcctgaccatccatagtttgtatcaataatagcaacatatgaagaacacgtttatacagagtatgtaaaaatgttaatttatagtttaatcccatggcccacgcacacacgattaattttttttcatctccctttagattgttgtatagaaatttgggtactgtgaactccgccgtagtttccatgggactatataattttgtggcctcgaatacaaattttactacatagttatctatcttaaagactataccatatcctcctgtagatatgtgataaaaatcgtcgtttataggataaaatcgtttatccttttgttggaaaaaggatgaattaatgtaatcattctcttctatctttagtagtgtttccttattaaaattcttaaaataatttaacaatctaactgacggagcccaattttggtgtaaatctaattgggacattatattgttaaaatacaaacagtctcctaatataacagtatctgataatctatggggagacatccattgatattcaggggatgaatcattggcaacacccatttattgtacaaaaagccccaatttacaaacgaaagtccaggtttgatagagacaaacaattaactattttgtctctgtttttaacacctccacagtttttaatttctttagtaatgaaattattcacaatatcagtatcttctttatctaccagagattttactaacttgataaccttggctgtctcattcaatagggtagtaatatttgtatgtgtgatattgatatctttttgaattgtttcttttagaagtgattctttgatggtgccagcatacgaattacaataatgcagaaactcggttaacatgcaggaattatagtaagccaattccaattgttgcctgtgttgtattagagtgtcaatatgagcaatggtgtccttgcgtttctctgatagaatgcgagcagcgattttggcgttatcatttgacgatatttctggaatgacgaatcctgtttctactaactttttggtaggacaaagtgaaacaatcaagaagatagcttctcctcctatttgtggaagaaattgaactcctctagatgatctactgacgatagtatctccttgacagatattggaccgaattacagaagtacctggaatgtaaagccctgaaaccccctcattttttaagcagattgttgccgtaaatcctgcactatgcccaagatagagagctcctttggtgaatccatctctatgtttcagtttaaccaagaaacagtcagctggtctaaaatttccatctctatctaatacagcatctaacttgatgtcaggaactatgaccggtttaatgttatatgtaacattgagtaaatccttaagttcataatcatcactgtcatcagttatgtacgatccaaacaatgtttctaccggcatagtggatacgaagatgctatccatcagaatgtttccctgattagtattttctatatagctattcttctttaaacgattttccaaatcagtaactatgttcatttttttaggagtaggacgcctagccagtatggaagaggattttctagatcctctcttcaacatctttgatctcgatggaatgcaaaaccccatagtgaaacaaccaacgataaaaataatattgtttttcactttttataattttaccatctgactcatggattcattaatatctttataagagctactaacgtataattctttataactgaactgagatatatacaccggatctatggtttccataattgagtaaatgaatgctcggcaataactaatggcaaatgtatagaacaacgaaattatactagagttgttaaagttaatattttctatgagctgttccaataaattatttgttgtgactgcgttcaagtcataaatcatcttgatactatccagtaaaccgtttttaagttctggaatattatcatcccattgtaaagcccctaattcgactatcgaatatcctgctctgatagcagtttcaatatcgacggacgtcaatactgtaataaaggtggtagtattgtcatcatcgtgataaactacgggaatatggtcgttagtaggtacggtaactttacacaacgcgatatataactttccttttgtaccatttttaacgtagttgggacgtcctgcagggtattgttttgaagaaatgatatcgagaacagatttgatacgatatttgttggattcctgattattcactataatataatctagacagatagatgattcgataaatagagaaggtatatcgttggtaggataatacatccccattccagtattctcggatactctattgatgacactagttaagaacatgtcttctattctagaaaacgaaaacatcctacatggactcattaaaacttctaacgctcctgattgtgtctcgaatgcctcgtacaaggatttcaaggatgccatagattctttgaccaacgatttagaattgcgtttagcatctgatttttttattaaatcgaatggtcggctctctggtttgctaccccaatgataacaatagtcttgtaaagataaaccgcaagaaaatttatacgcatccatccaaataaccctagcaccatcggatgatattaatgtattattatagattttccatccacaattattgggccagtatactgttagcaacggtatatcgaatagattactcatgtaacctactagaatgatagttcgtgtactagtcataatatctttaatccaatctaaaaaatttaaaattagattttttacactgttaaagttaacaaaagtattacccgggtacgtggatatcatatatggcattggtccattatcagtaatagctccataaactgatacggcgatggtttttatatgtgtttgatctaacgaggaagaaattcgcgcccacaattcatctctagatatgtatttaatatcaaacggtaacacatcaatttcgggacgcgtatatgtttctaaatttttaatccaaatataatgatgacctatatgccctattatcatactgtcaactatagtacacctagggaacttacgatacatctgtttcctataatcgttaaattttacaaatctataacatgctaaaccttttgacgacagccattcattaatttctgatatggaatctgtattctcgataccgtatcgttctaaagccagtgctatatctccctgttcgtgggaacgctttcgtataatatcgatcaacggataatctgaagtttttggagaataatatgactcatgatctatttcgtccataaacaatctagacataggaattggaggcgatgatcttaattttgtgcaatgagtcgtcaatcctataacttctaatcttgtaatattcatcatcgacataatactatctatgttatcatcgtatattagtataccatgaccttcttcatttcgtgccaaaatgatatacagtcttaaatagttacgcaatatctcaatagtttcataattgttagctgttttcatcaaggtttgtatcctgtttaacatgatggcgttctataacgtctctattttctatttttaattttttaaatttttaacgatttactgtggctagatacccaatctctctcaaatatttttttagcctcgcttacaagctgtttatctatactattaaaactgacgaatccgtgattttggtaatgggttccgtcgaaatttgccgaagtgatatgaacatattcgtcgtcgactatcaacaattttgtattattctgaatagtgaaaaccttcacagatagatcattttgaacacacaacgcatctagacttttggcggttgccatagaatatacgtcgttcttatcccaattaccaactagaagtctgatcttaactcctctattaatggctgcttctataatggagttgtaaatgtcgggccaatagtagctattaccgtcgacacgtgtagtgggaactatggccaaatgttcaatatctatactagtcttagctgacctgagtttatcaataactacatcggtatctagatctctagaatatcccaataggtgttccggagaatcagtaaagaacactccacctataggattcttaatatgatacgcagtgctaactggcaaacaacaagccgcagagcataaattcaaccatgaattttttgcgctattaaaggctttaaaagtatcaaatcttctacgaagatctgtggccagcgggggataatcagaatatacacctaacgttttaatcgtatgtatagatcctccagtaaatgacgcgtttcctacataacatctttcatcatctgacacccaaaaacaaccgagtagtagtcccacattattttttttatctatattaacggttataaaatttatatccgggcagtgactttgtagctctcccagatttcttttccctcgttcatctagcaaaactattattttaatccctttttcagatgcctcttttagtttatcaaaaataagcgctcccctagtcgtactcagaggattacaacaaaaagatgctatgtatatatatttcttagctagagtgataatttcgttaaaacattcaaatgttgttaaatgatcggatctaaaatccatattttctggtagtgtttctaccagcctacattttgctcccgcaggtaccgatgcaaatggccacatttagttaacataaaaacttatacatcctgttctatcaacgattctagaatatcatcggctatatcgctaaaattttcatcaaagtcgacatcacaacctaactcagtcaatatattaagaagttccatgatgtcatcttcgtctatttctatatccgtatccattgtagattgttgaccgattatcgagtttaaatcattactaatactcaatccttcagaatacaatctgtgtttcattgtaaatttataggcggtgtatttaagttggtagattttcaattatgtattaatatagcaacagtagttcttgctcctccttgattctagcatcctcttcattattttcttctacgtacataaacatgtccaatacgttagacaacacaccgacgatggcggccgcagatctcgagttatgatctacttccttaccgtgcaataaattagaatatattttctacttttacgagaaattaattattgtatttattatttatgggtgaaaaacttactataaaaagcgggtgggtttggaattagtgaaagcttaaaaattgaaattttattttttttttttggaatataaataagctcgaagtcgacagatctaggcctggtaccaggaggaggaattcagcttaaagatgacttcgaaagtttatgatccagaacaaaggaaacggatgataactggtccgcagtggtgggccagatgtaaacaaatgaatgttcttgattcatttattaattattatgattcagaaaaacatgcagaaaatgctgttatttttttacatggtaacgcggcctcttcttatttatggcgacatgttgtgccacatattgagccagtagcgcggtgtattataccagatcttattggtatgggcaaatcaggcaaatctggtaatggttcttataggttacttgatcattacaaatatcttactgcatggtttgaacttcttaatttaccaaagaagatcatttttgtcggccatgattggggtgcttgtttggcatttcattatagctatgagcatcaagataagatcaaagcaatagttcacgctgaaagtgtagtagatgtgattgaatcatgggatgaatggcctgatattgaagaagatattgcgttgatcaaatctgaagaaggagaaaaaatggttttggagaataacttcttcgtggaaaccatgttgccatcaaaaatcatgagaaagttagaaccagaagaatttgcagcatatcttgaaccattcaaagagaaaggtgaagttcgtcgtccaacattatcatggcctcgtgaaatcccgttagtaaaaggtggtaaacctgacgttgtacaaattgttaggaattataatgcttatctacgtgcaagtgatgatttaccaaaaatgtttattgaatcggatccaggattcttttccaatgctattgttgaaggcgccaagaagtttcctaatactgaatttgtcaaagtaaaaggtcttcatttttcgcaagaagatgcacctgatgaaatgggaaaatatatcaaatcgttcgttgagcgagttctcaaaaatgaacaagcggccgccgccaccatgagcaagggcgaggaactgttcactggcgtggtcccaattctcgtggaactggatggcgatgtgaatgggcacaaattttctgtcagcggagagggtgaaggtgatgccacatacggaaagctcaccctgaaattcatctgcaccactggaaagctccctgtgccatggccaacactggtcactaccttcacctatggcgtgcagtgcttttccagatacccagaccatatgaagcagcatgactttttcaagagcgccatgcccgagggctatgtgcaggagagaaccatctttttcaaagatgacgggaactacaagacccgcgctgaagtcaagttcgaaggtgacaccctggtgaatagaatcgagctgaagggcattgactttaaggaggatggaaacattctcggccacaagctggaatacaactataactcccacaatgtgtacatcatggccgacaagcaaaagaatggcatcaaggtcaacttcaagatcagacacaacattgaggatggatccgtgcagctggccgaccattatcaacagaacactccaatcggcgacggccctgtgctcctcccagacaaccattacctgtccacccagtctgccctgtctaaagatcccaacgaaaagagagaccacatggtcctgctggagtttgtgaccgctgctgggatcacacatggcatggacgagctgtacaagtgagcggccgccctgctagcaagcttgctagcggccgctcgagatctgcggccgctacagacacgaatatgactaaaccgatgaccatttaaaaacccctctctagctttcacttaaactgtatcgatcattcttttagcacatgtataatataaaaacattattctatttcgaatttaggcttccaaaaatttttcatccgtaaaccgataataatatatatagacttgttaatagtcggaataaatagattaatgcttaaactatcatcatctccacgattagagatacaatatttacattctttttgctgtttcgaaactttatcaatacacgttaatacaaacccaggaaggagatattgaaactgaggctgttgaaaatgaaacggtgaatacaataattcagataatgtaaaatcatgattccgtattctgatgatattagaactgctaatggatgtcgatggtatgtatctaggagtatctattttaacaaagcatcgatttgctaatatacaattatccttttgattaattgttattttattcatattcttaaaaggtttcatatttatcaattcttctacattaaaaatttccatttttaatttatgtagccccgcaatactcctcattacgtttcattttttgtctataatatccattttgttcatctcggtacatagattatccaattgagaagcgcatttagtagttttgtacattttaagtttattgacgaatcgtcgaaaactagttatagttaacattttattatttgataccctgatattaatacccctgccgttactattatttataactgatgtaatccacgtaacattggaattaactatcgatagtaatgcatcgacgcttccaaaattgtctattataaactcaccgataatttttttattgcatgttttcatattcattaggattatcaaatctttaatcttattacgattgtatgcgttgatattacaagacgtcattctaaaagacggaggatctccatcaaatgccagacaatcacgtacaaagtacatggaaataggttttgttctattgcgcatcatagatttatatagaacacccgtagaaatactaatttgttttactctataaaatactaatgcatctatttcatcgttttgtataacgtctttccaagtgtcaaattccaaatttttttcattgatagtaccaaattcttctatctctttaactacttgcatagataggtaattacagtgatgcctacatgccgttttttgaaactgaatagatgcgtctagaagcgatgctacgctagtcacaatcaccactttcatatttagaatatatatatgtaaaaatatagtagaatttcattttgtttttttctatgctataaatgaattctcattttgcatctgctcatactccgttttatattaataccaaagaaggaagatatctggttctaaaagccgttaaagtatgcgatgttagaactgtagaatgcgaaggaagtaaagcttcctgcgtactcaaagtagataaaccctcatcgcccgcgtgtgagagaagaccttcgtccccgtccagatgcgagagaatgaataaccctggaaaacaagttccgtttatgaggacggacatgctacaaaatatgttcgcggctaatcgcgataatgtagcttctagacttttgtcctaaaatactattatatccttttcgatattaataaatccgtgtcgtccaggttttttatctctttcagtatgtgaatagataggtattttatctctattcatcatcgaatttaagagatccgataaacattgtttgtattctccagatgtcagcatctgatacaacaatatatgtgcacataaacctctggcacttatttcatgtaccttccccttatcactaaggagaatagtatttgagaaatatgtatacatgatattatcatgaattagatatacagaatttgtaacactctcgaaatcacacgatgtgtcggcgttaagatctaatatatcactcgataacacattttcatctagatacactagacattttttaaagctaaaatagtctttagtagtaacagtaactatgcgattattttcatcgatgatacatttcatcggcatattattacgcttaccatcaaagactataccatgtgtatatctaacgtattctagcatggttgccatacgcgcattaaacttttcaggatctttggatagatcttccaatctatctatttgagaaaacatttttatcatgttcaatagttgaaacgtcggatccactatatagatattatctataaagattttaggaactacgttcatggtatcctggcgaatattaaaactatcaatgatatgattatcgttttcatcttttatcaccatatagtttctaagatatgggattttacttaatataatattatttcccgtgataaattttattagaaaggccaaatctataagaaaagtcctagaattagtctgaagaatatctatatcgccgtatagtatatttggattaattagatatagagaatatgatccgtaacatatacaacttttattatggcgtctaagatattcttccatcaacttattaacatttttgactagggaagatacattatgacgtcccattacttttgccttgtctattactgcgacgttcatagaatttagcatatctcttgccaattcttccattgatgttacattataagaaattttagatgaaattacatttggagctttaatagtaagaactcctaatatgtccgtgtatgtggtcactaatacagattgtagttctataatcgtaaataatttacctatattatatgtttgagtctgtttagaaaagtagctaagtatacgatcttttatttctgatgcagatgtattaacatcggaaaaaaatctttttttattcttttttactaaagatacaaatatgtctttgttaaaaacagttattttctgaatatttctagcttgtaattttaacatatgatattcgttcacactaggtactctgcctaaataggtttctataatctttaatgtaatattaggaaaagtattctgatcaggattcctattcattttgaggatttaaaactctgattattgtctaatatggtctctacgcaaactttttcacagagcgatagagtttttgataactcgtttttcttaagaaatataaaactactgtctccagagctcgctctatcttttattttatctaattcgatacaaactcctgatactggttcagaaagtaattcattaattttcagtcctttatagaagatatttaatatagataatacaaaatcttcagtttttgatatcgatctgattgatcctagaactagatatattaataacgtgctcattaggcagtttatggcagcttgataattagatatagtatattccagttcatatttattagataccgcattgcccagattttgatattctatgaattcctctgaaaataaatccaaaataactagacattctattttttgtggattagtgtactctcttccctctatcatgttcactactggtgtccacgatgataaatatctagagggaatataatatagtccataggatgccaatctagcaatgtcgaataactgtaattttattcttcgctcttcattatgaattgattcttgaggtataaacctaacacaaattatattattagacttttcgtatgtaatgtctttcatgttataagtttttaatcctggaatagaatctattttaatgaggcttttaaacgcagagttctccaacgagtcaaagcataatactctgttgtttttcttatatacgatgttacgattttcttctttgaatggaataggtttttgaattagtttataattacaacataatagataaggaagtgtgcaaatagtacgcggaaaaaacataatagctcccctgttttcatccatggttttaagtaaatgatcactggcttctttagtcaatggatattcgaacattaaccgtttcatcatcattggacagaatccatatttcttaatgtaaagagtgatcaaatcattgtgtttattgtaccatcttgttgtaaatgtgtattcggttatcggatctgctcctttttctattaaagtatcgatgtcaatctcgtctaagaattcaactatatcgacatatttcatttgtatacacataaccattactaacgtagaatgtataggaagagatgtaacgggaacagggtttgttgattcgcaaactattctaatacataattcttctgttaatacgtcttgcacgtaatctattatagatgccaagatatctatataattattttgtaagatgatgttaactatgtgatctatataagtagtgtaataattcatgtattttgatatatgttccaactctgtctttgtgatgtctagtttcgtaatatctatagcatcctcaaaaaatatattcgcatatattcccaagtcttcagttctatcttctaaaaaatcttcaacgtatggaatataataatctattttacctcttctgatatcattaatgatatagtttttgacactatcttctgtcaattgattcttattcactatatctaagaaacggatagcgtccctaggacgaactactgccattaatatctctattatagcttctggacataattcatctattataccagaattaatgggaactattccgtatctatctaacatagttttaagaaagtcagaatctaagacttgatgttcatatattggttcatacatgaaatgatctctattgatgatagtgactatttcattctctgaaaattggtaactcattctatatatgctttccttgttgatgaaggatagaatatactcaatagaatttgtaccaacaaactgttctcttatgaatcgtatatcatcatctgaaataatcatgtaaggcatacatttaacaattagagacttgtctcctgttatcaatatactattcttgtgataatttatgtgtgaggcaaatttgtccacgttctttaattttgttatagtagatatcaaatccaatggagctacagttcttggcttaaacagatatagtttttctggaacaaattctacaacattattataaaggactttgggtagataagtgggatgaaatcctattttaattaatgcgatagccttgtcctcgtgcagatatccaaacgcttttgtgatagtatggcattcattgtctagaaacgctctacgaatatctgtgacagatatcatctttagagaatatactagtcgcgttaatagtactacaatttgtattttttaatctatctcaataaaaaaattaatatgtatgattcaatgtataactaaactactaactgttattgataactagaatcagaatctaatgatgacgtaaccaagaagtttatctactgccaatttagctgcattatttttagcatctcgtttagattttccatcggccttatcgaatactcttccgtcgatgtctacacaggcataaaatgtaggagagttactaggcccaactgattcaatacgaaaagaccaatctctcctagtaatttggcagtactcattaataacggtgacagggttagcatctttccaatcaataatttttttagccggaataacatcatcaaaagacttatgatcctctctcattgatttttcgcgggatacatcatctattatgacgtcagccatagcatcagcatccggcttatccgcctccgttgtcataaaccaacgaggaggaatatcgtcggagctgtacaccatagcactacgttgaagatcgtacagagctttattaacttctcgcttctccatattaagttgtctagttagttgtgcagcagtagctccttcgattccaatgtttttaatagccgcacacacaatctctgcgtcagaacgctcgtcaatatagatcttagacatttttagagagaactaacgcaaccagcaataaaactgaacctactttatcatttttttattcatcatcctctggtggttcgtcgttcctatcaaatgtagctctgattaacccgtcatctataggtgatgctggttctggagattctggaggagatggattattatctggaagaatctctgttatttccttgttttcatgtatcgattgcgttgtaacattaagattgcgaaatgctctaaatttgggaggcttaaagtgttgtttgcaatctctacacgcgtgtctaactagtggaggttcgtcagctgctctagtttgaatcatcatcggcgtagtattcctacttttacagttaggacacggtgtattgtatttctcgtcgagaacgttaaaataatcgttgtaactcacatcctttattttatctatattgtattctactcctttcttaatgcattttataccgaataagagatagcgaaggaattctttttcggtgccgctagtacccttaatcatatcacatagtgttttatattccaaatttgtggcaatagacggtttatttctatacgatagtttgtttctggaatcctttgagtattctataccaatattattctttgattcgaatttagtttcttcgatattagattttgtattacctatattcttgatgtagtactttgatgatttttccatggcccattctattaagtcttccaagttggcatcatccacatattgtgatagtaattctcggatatcagtagcggctaccgccattgatgtttgttcattggatgagtaactactaatgtatacattttccatttataacacttatgtattaactttgttcatttatattttttcattattatgttgatattaacaaaagtgaatatatatatgttaataattgtattgtggttatacggctacaattttataatgagtgaaagtcagtgtccgatgatcaatgacgatagctttactctgaaaagaaagtatcaaatcgatagtgcggagtcaacaataaaaatggataagaagaggataaagtttcagaatagagccaaaatggtaaaagaaataaatcagacaataagagcagcacaaactcattacgagacattgaaactaggatacataaaatttaagagaatgattatgactactactctagaagatatagcaccatctattccaaataatcagaaaacttataaactattctcggacatttcagccatcggcaaagcatcacagaatccgagtaagatggtatatgctctgctgctttacatgtttcccaatttgtttggagatgatcatagattcattcgttatagaatgcatccaatgagtaaaatcaaacacaagatcttctctcctttcaaacttaatcttattagaatattagtggaagaaagattctataataatgaatgcagatctaataaatggagaataattggaacacaagttgataaaatgttgatagctgaatctgataaatatacaatagatgcaaggtataacctaaaacccatgtatagaatcaagggagaatctgaagaagataccctctttatcaaacagatggtagaacaatgtgtgacatcccaggaattggtggaaaaagtgttgaagatactgtttagagatttgttcaagagtggagaatacaaagcgtacagatacgatgatgatgtagaaaatggatttattggattggatacactaaaattaaacattgttcatgatatagttgaaccatgtatgcctgttcgtaggccagtggctaagatactgtgtaaagaaatggtaaataaatactttgagaatccgctacatattattggtaaaaatcttcaagagtgcattgactttgttagtgaataggcatttcatctttctccaatactaattcaaattgttaaattaataatggatagtataaatagttattagttataagatagtaaaaataattattagaataagagtgtagtatcatagataactctcttctataaaaatggattttattcgtagaaagtatcttatatacacagtagaaaataatatagattttttaaaggatgatacattaagtaaagtaaacaattttaccctcaatcatgtactagctctcaagtatctagttagcaattttcctcaacacgttattactaaggatgtattagctaataccaatttttttgttttcatacatatggtacgatgttgtaaagtgtacgaagcggttttacgacacgcatttgatgcacccacgttgtacgttaaagcattgactaagaattatttatcgtttagtaacgcaatacaatcgtacaaggaaaccgtgcataaactaacacaagatgaaaaatttttagaggttgccgaatacatggacgaattaggagaacttataggcgtaaattatgacttagttcttaatccattatttcacggaggggaacccatcaaagatatggaaatcatttttttaaaactgtttaagaaaacagacttcaaagttgttaaaaaattaagtgttataagattacttatttgggcatacctaagcaagaaagatacaggcatagagtttgcggataatgatagacaaaatatatacactctatttcaacaaactggtagaatcgtccatagcaatctaacagaaacgtttagagattatatctttcccggagataagactagctattgggtgtggttaaacgaaagtatagctaatgatgcggatatcgttcttaatagacacgccattaccatgtatgataaaattcttagttatatatactctgagataaaacaaggacgcgttaataaaaacatgcttaagttagtttatatctttgagcctgaaaaagatatcagagaacttctgctagaaatcatatatgatattcctggagatatcctatctattattgatgcaaaaaacgacgattggaaaaaatattttattagtttttataaagctaattttattaacggtaatacatttattagtgatagaacgtttaacgaggacttattcagagttgttgttcaaatagatcccgaatatttcgataatgaacgaattatgtctttattctctacgagtgctgcggacattaaacgatttgatgagttagatattaataacagttatatatctaatataatttatgaggtgaacgatatcacattagatacaatggatgatatgaagaagtgtcaaatctttaacgaggatacgtcgtattatgttaaggaatacaatacatacctgtttttgcacgagtcggatcccatggtcatagagaacggaatactaaagaaactgtcatctataaaatccaagagtagacggctgaacttgtttagcaaaaacattttaaaatattatttagacggacaattggctcgtctaggtcttgtgttagatgattataaaggagacttgttagttaaaatgataaaccatcttaagtctgtggaggatgtatccgcattcgttcgattttctacagataaaaaccctagtattcttccatcgctaatcaaaactattttagctagttataatatttccatcatcgtcttatttcaaaggtttttgagagataatctatatcatgtagaagaattcttggataaaagcatccatctaaccaagacggataagaaatatatacttcaattgataagacacggtagatcatagaacagaccaaatatattattaataatttgtatatacatagatataattatcacacatttttgataaatgggaactgctgcaacaattcagactcccaccaaattaatgaataaagaaaatgcagaaatgattttggaaaaaattgttgatcatatagttatgtatattagtgacgaatcaagtgattcagaaaataatcctgaatatattgattttcgtaacagatacgaagactatagatctctcattataaaaagtgatcacgagtttgtaaagctatgtaaaaatcatgcggagaaaagttctccagaaacgcaacaaatgattatcaaacacatatacgaacaatatcttattccagtatctgaagtactattaaaacctataatgtccatgggtgacataattacatataacggatgtaaagacaatgaatggatgctagaacaactctctaccctaaactttaacaatctccgcacatggaactcatgtagcataggcaatgtaacgcgtctgttttatacattttttagttatctgatgaaagataaactaaatatataagtataatcccattctaatactttaacctgatgtattagcatcttattagaatattaacctaactaaaagacataacataaaaactcattacatagttgataaaaagcggtaggatataaatattatggctgccaccgttccgcgttttgacgacgtgtacaaaaatgcacaaagaagaattctagatcaagaaacattttttagtagaggtctaagtagaccgttaatgaaaaacacatatctatttgataattacgcgtatggatggataccagaaactgcaatttggagtagtagatacgcaaacctagatgctagtgactattatcccatttcgttgggattacttaaaaagttcgagtttctcatgtctctatataaaggtcctattcccgtatatgaagaaaaagtaaatactgaattcatagccaatggatcgttctctggtagatacgtatcatatcttcgaaagttttctgcccttccaacaaacgagtttattagttttttgttactgacttccattccaatctataatatcttgttctggtttaaaaacacacagtttgatattactaaacacacattattcagatacgtctatacagataatgccaaacacctggcgttggctaggtatatgcatcaaacaggagactataagcctttgtttagtcgtctcaaagagaattatatatttaccggtcccgttccaataagtatcaaagatatagatcaccctaatcttagtagagcaagaagtccatccgattatgagacattagctaatattagtactatattgtactttaccaagtatgatccggtattaatgtttttattgttttacgtacctgggtattcaattactacaaaaattactccagccgtagaatatctaatggataaactgaatctaacaaagagcgacgtacaactgttgtaaattattttatgcttcgtaaaatgtaggttttgaaccaaacattctttcaaagaatgagatgcataaaactttattatccaatagattgactatttcggacgtcaatcgtttaaagtaaacttcgtaaaatattctttgatcactgccgagtttaaaacttctatcgataattgtctcatatgttttaatatttacaagttttttggtccatggtacattagccggacaaatatatgcaaaataatatcgttctccaagttctatagtttctggattatttttattatattcagtaactaaatacatattagggttatctgcggatttataatttgagtgatgcattctactcaacataaataattctagaggagacgatctactatcaaattcggatcgtaaatctgtttctaaagaacggagaatatctatacatacctgattagaattcatccgtccttcagacaacatctcagacagtctggttttgtacatcttaatcatattcttatgaaacttggaaacatctcttctagtttcactagtacctttattaattctctcaggtacagattttgaattcgacgatgctgagtatttcatcgttgtatatttcttcttcgattgcataatcagattcttatataccgcctcaaactctattttaaaattattaaacaatactctattattaatcagtcgttctaactctttcgctatttctatagacttatctacatcttgactgtctatctctgtaaacacggagtcggtatctccatacacgctacgaaaacgaaatctgtaatctataggcaacgatgttttcacaatcggattaatatctctatcgtccatataaaatggattacttaatggattggcaaaccgtaacataccgttagataactctgctccatttagtaccgattctagatacaagatcattctacgtcctatggatgtgcaactcttagccgaagcgtatgagtatagagcactatttctaaatcccatcagaccatatactgagttggctactatcttgtacgtatattgcatggaatcatagatggccttttcagttgaactggtagcctgttttagcatctttttatatctggctctctctgccaaaaatgttcttaatagtctaggaatggttccttctatcgatctatcgaaaattgctatttcagagatgaggttcggtagtctaggttcacaatgaaccgtaatatatctaggaggtggatatttctgaagcaatagctgattatttatttcttcttccaatctattggtactaacaacgacaccgactaatgtttccggagatagatttccaaagatacacacattaggatacagactgttataatcaaagattaatacattattactaaacattttttgttttggagcaaataccttaccgccttcataaggaaacttttgttttgtttctgatctaactaagatagttttagtttccaacaatagctttaacagtggacccttgatgactgtactcgctctatattcgaataccatggattgaggaagcacatatgttgacgcacccgcgtctgtttttgtttctactccataatactcccacaaatactgacacaaacaagcatcatgaatacagtatctagccatatctaaagctatgtttagattataatccttatacatctgagctaaatcaacgtcatcctttccgaaagataatttatatgtatcattaggtaaagtaggacataatagtacgactttaaatccattttcccaaatatctttacgaattactttacatataatatcctcatcaacagtcacataattacctgtggttaaaacctttgcaaatgcagcggctttgcctttcgcgtctgtagtatcgtcaccgatgaacgtcatttctctaactcctctatttaatactttacccatgcaactgaacgcgttcttggatatagaatccaatttgtacgaatccaatttttcaaatttttgaatgaatgaatatagatcgaaaaatatagttccattattgttattaacgtgaaacgtagtattggccatgccgcctactcccttatgactagactgatttctctcataaatacagagatgtacagcttcctttttgtccggagatctaaagataattttctctcctgttaataactctagacgattagtaatatatctcagatcaaagttatgtccgttaaaggtaacgacgtagtcgaacgttagttccaacaattgtttagctattcgtaacaaaactatttcagaacatagaactagttctcgttcgtaatccatttccattagtgactgtatcctcaaacatcctctatcgacggcttcttgtatttcctgttccgttaacatctcttcattaatgagcgtaaacaataatcgtttaccacttaaatcgatataacagtaacttgtatgcgagattgggttaataaatacagaaggaaacttcttatcgaagtgacactctatatctagaaataagtacgatcttgggatatcgaatctaggtatttttttagcgaaacagttacgtggatcgtcacaatgataacatccattgttaatctttgtcaaatattgctcgtccaacgagtaacatccgtctggagatatcccgttagaaatataaaaccaactaatattgagaaattcatccatggtggcattttgtatgctgcgtttctttggctcttctatcaaccacatatctgcgacggagcattttctatctttaatatctagattataacttattgtctcgtcaatgtctatagttctcatctttcccaacggcctcgcattaaatggaggaggagacaatgactgatatatttcgtccgtcactacgtaataaaagtaatgaggaaatcgtataaatacggtctcgccatttcgacatctggatttcagatataaaaatctgttttcaccgtgactttcaaaccaattaatgcaccgaacatccatttatagaatttagaaatatattttcatttaaatgaatcccaaacattggggaagagccgtatggaccattatttttatagtactttcgcaagcgggtttagacggcaacatagaagcgtgtaaacgaaaactatatactatagttagcactcttccatgtcctgcatgtagacggcacgcgactatcgctatagaggacaataatgtcatgtctagcgatgatctgaattatatttattattttttcatcagattatttaacaatttggcatctgatcccaaatacgcgatcgatgtgacaaaggttaaccctttataaacttaacccattataaaacttatgattagtcacaactgaaataaccgcgtgattattttttggtataattctacacggcatggtttctgtgactatgaattcaacccccgttacattagtgaaatctttaacaaacagcaagggttcgtcaaagacataaaactcattgtttacaatcgaaatagaccccctatcacacttaaaataaaaaatatccttatcctttaccaccaaataaaattctgattggtcaatgtgaatgtattcacttaacagttccacaaatttatttattaactccgaggcacatacatcgtcggtattttttatggcaaactttactcttccagcatccgtttctaaaaaaatattaacgagttccatttatatcatccaatattattgaaatgacgttgatggacagatgatacaaataagaaggtacggtacctttgtccaccatctcctccaattcatgctctattttgtcattaactttaatgtatgaaaacagtacgccacatgcttccatgacagtgtgtaacactttggatacaaaatgtttgacattagtataattgtccaagactgtcaatctataatagatagtagctataatatattctatgatggtattgaagaagatgacaaccttggcatattgatcatttaacacagacatggtatcaacagatagcttgaatgaaagagaatcagtaattggaataagcgtcttctcgatagagtgtccgtataccaacatgtctgatattttgatgtattccattaaattatttagttttttctttttattctcgttaaacagcatttctgtcaacggaccccaacatcgttgaccgattaagttttgattgatttttccgtgtaaggcgtatctagtcagatcgtatagcctatccaataatccatcgtctgtgtgtagatcacatcgtacactttttaattctctatagaagagcgacagacatctggagcaattacagacagcaatttctttattctctacagatgtaagatacttgaagacattcctatgatgatgcagaattttggataacacggtattgatggtatctgttaccataattcctttgatggctgatagtgtcagagcacaagatttccaatctttgacaatttttagcaccattatctttgttttgatatctatatcagacagcatggtgcgtctgacaacacagggattaagacggaaagatgaaatgattctctcaacatcttcaatagataccttgctattttttctggcattatctatatgtgcgagaatatcctctagagaatcagtatcctttttgatgatagtggatctcaatgacatgggacgtttaaaccttcttattctatcaccagattgcatggtgatttgtcttctttcttttatcataatgtaatctctaaattcatcggcaaattgtctatatctaaaatcataatatgagatgtttacctctacaaatatctgttcgtccaatgttagagtatttacatcagttttgtattccaaattaaacatggcaacggatttaattttatattcctctattaagtcctcgtcgataataacagaatgtagataatcatttaatccgtcgtacatggttggaagatgcttgttgacaaaatctttaattgtcttgatgaaggtgggactatatctaacatcttgattaataaaatttataacattgtccataggatactttgtaactagttttatacacatctcttcatcggtaagtttagacagaatatcgtgaacaggtggtatattatattcatcagatatacgaagaacaatgtccaaatctatattgtttaatatattatatagatgtagcgtagctcctacaggaatatctttaactaagtcaatgatttcatcaaccgttagatctattttaaagttaatcatataggcattgatttttaaaaggtatgtagccttgactacattctcattaattaaccattccaagtcattgtgtgtaagaagattatattctatcataagcttgactacatttggtcccgataccattaaagaattcttatgatataaggaaacagattttaggtactcatctactctacaagaattttggagagccttaacgatatcagtgacgtttattatttcaggaggaaagaatctaacattgagaatatcggaattaatagcttccagatacagtgattttggcaatagtccgtgtaatccataatccagtaacacgagctggtgcttgctagacaccttttcaatgtttaatttttttgaaataagctttgataaagccttcctcgcaaattccggatacatgaacatgtcggcgacatgattaagtattgttttttcattatttttatattttctcaacaagttctcaataccccaatagatgatagaatatcacccaatgcgtccatgttgtctatttccaacaggtcgctatatccaccaatagaagtttttccaaaaaagattctaggaacagttctaccaccagtaatttgttcaaaataatcccgcaattcattttcgggtttaaattctttaatatcgacaatttcatacgctcctcttttgaaactaaacttatttagaatatccagtgcatttctacaaaaaggacatgtatacttgacaaaaattgtcactttgttattggccaacctttgttgtacaaattcctcggccattttaatatttaagtgatataaaactatctcgacttatttaactctttagtcgagatatatggacgcagatagctatatgatagccaactacagaaggcaaacgctataaaaaacataattacgacgagcatatttataaatatttttattcagcattacttgatatagtaatattaggcacagtcaaacattcaaccactctcgatacattaactctctcattttctttaacaaattctgcaatatcttcgtaaaaagattcttgaaactttttagaatatctatcgactctagatgaaatagcgttcgtcaacatactatgttttgtatacataaaggcgcccattttaacagtttctagtgacaaaatgctagcgatcctaggatcctttagaatcacatagattgacgattcgtctctcttagtaactctagtaaaataatcatacaatctagtacgcgaaataatattatccttgacttgaggagatctaaacaatctagttttgagaacatcgataagttcatcgggaatgacatacatactatctttaatagaactcttttcatccagttgaatggattcgtccttaaccaactgattaatgagatcttctattttatcattttccagatgatatgtatgtccattaaagttaaattgtgtagcgcttctttttagtctagcagccaatactttaacatcactaatatcgatatacaaaggagatgatttatctatggcattaagaattcgtttttcgacatccgtcaaaaccaattcctttttgcctgtatcatccagttttccatcctttgtaaagaaattattttctactagactattaataagactgataaggattcctccataattgcacaatccaaactttttaacaaaactagactttacgagatctacaggaatgcgtacttcaggttttttagcttgtgattttttcttttgcggacattttctagtaaccaactcatctaccatttcattgattttagcagtgaaataagctttcaatgcacgggcactgatactattgaaaacgagttgatcttcaaattccgccatttaagttcaccaaacaacttttaaatacaaatatatcaatagtagtagaataagaactataaaaaaaataataattaaccaaccccaacaaccggtattattagttgatgtggtagttttctcatcacttagaacagatttaacaatttctataaagtctgtcaaatcatcttccggagaccccataaatacaccaaatatagcggcgtacaacttatccatttatacattgaatattggcttttctttatcgctatcttcatcatattcatcatcaatatcaacaagtcccagattacgagccagatcttcttctacattttcagtcattgatacacgttcactatctccagagagtccgataacgttagccaccacttctctatcaatgattagtttcttgagcgcgaaagtaatttttgtttccgttccggatctatagaagacgataggtgtgataattgccttggccaattgtctttctcttttactgagtgattctagttcaccttctatagatctgagaatggatgattctccagtcgaaacatattctaccatggatccgtttaatttgttgatgaagatggattcatccttaaatgttttctctgtaatagtttccaccgaaagactatgcaaagaatttggaatgcgttccttgtgcttaatgtttccatagacggcttctagaagttgatacaacataggactagccgcggtaacttttatttttagaaagtatccatcgcttctatcttgtttagatttatttttataaagtttagtctctccttccaacataataaaagtggaagtcatttgactagataaactatcagtaagttttatagagatagacgaacaattagcgtattgagaagcatttagtgtaacgtattcgatacattttgcattagatttactaatcgattttgcatactctataacacccgcacaagtctgtagagaatcgctagatgcagtaggtcttggtgaagtttcaactctcttcttgattaccttactcatgattaaacctaaataattgtactttgtaatataatgatatatattttcactttatctcatttgagaataaaaatgtttttgtttaaccactgcatgatgtacagatttcggaatcgcaaaccaccagtggttttattttatccttgtccaatgtgaattgaatgggagcggatgcgggtttcgtacgtagatagtacattcccgtttttagaccgagactccatccgtaaaaatgcatactcgttagtttggaataactcggatctgctatatggatattcatagattgactttgatcgatgaaggctcccctgtctgcagccatttttatgatcgtcttttgtggaatttcccaaatagttttataaactcgcttaatatcttctggaaggtttgtattctgaatggatccaccatctgccataatcctattcttgatctcatcattccataattttctctcggttaaaactctaaggagatgcggattaactacttgaaattctccagacaatactctccgagtgtaaatattactggtatacggttccaccgactcattatttcccaaaatttgagcagttgatgcagtcggcataggtgccaccaataaactatttctaagaccgtatgttctgattttatcttttagaggttcccaattccaaagatccgacggtacaacattccaaagatcatattgtagaataccgttactggcgtacgatcctacatatgtatcgtatggtccttccttctcagctagttcacaactcgcctctaatgcaccgtaataaatggtttcgaagatcttcttatttagatcttgtgcttccaggctatcaaatggataatttaagagaataaacgcgtccgctaatccttgaacaccaataccgataggtctatgtctcttattagagatttcagcttctggaataggataataattaatatctataattttattgagatttctgacaattactttgaccacatccttcagtttgagaaaatcaaatcgcccatctattacaaacatgttcaaggcaacagatgccagattacaaacggctacctcattagcatccgcatattgtattatctcagtgcaaagattactacacttgatagttcctaaattttgttgattactctttttgttacacgcatccttataaagaatgaatggagtaccagtttcaatctgagattctataatcgctttccagacgactcgagcctttattatagatttgtatctcctttctctttcgtatagtgtatacaatcgttcgaactcgtctccccaaacattgtccaatccaggacattcatccggacacatcaacgaccactctccgtcatccttcactcgtttcataaagagatcaggaatccaaagagctataaatagatctctggttctatgttcctcgtttcctgtattctttttaagatcgaggaacgccataatatcagaatgccacggttccaagtatatggccataactccaggccgtttgtttcctccctgatctatgtatctagcggtgttattataaactctcaacattggaataataccgtttgatataccattggtaccggagatatagcttccactggcacgaatattactaattgatagacctattccccctgccattttagagattaatgcgcatcgttttaacgtgtcatagataccctctatgctatcatcgatcatgttaagtagaaaacagctagacatttggtgacgactagttcccgcattaaataaggtaggagaagcgtgcgtaaaccatttttcagaaagtagattgtacgtctcaatagctgagtctatatcccattgatgaattcctactgcgacacgcattaacatgtgctgaggtctttcaacgatcttgttgtttattttcaacaagtaggatttttccaaagttttaaaaccaaaatagttgtatgaaaagtctcgttcgtaaataataaccgagttgagtttatccttatatttgttaactatatccatggtgatacttgaaataatcggagaatgtttcccatttttaggattaacatagttgaataaatcctccatcacttcactaaatagtttttttgtttccttgtgtagatttgatacggctattctggcggctagaatggcataatccggatgttgtgtagtacaagtggctgctatttcggctgccagagtgtccaattctaccgttgttactccattatatattccttgaataaccttcatagctattttaataggatctatatgatccgtgtttaagccataacataattttctaatacgagacgtgattttatcaaacatgacattttccttgtatccatttcgtttaatgacaaacatttttgttggtgtaataaaaaaattatttaacttttcattaatagggatttgacgtatgtagcgtacaaaatgattgttcctggtatatagataaagagtcctatatatttgaaaatcgttacggctcgattaaactttaatgattgcatagtgaatatatcattaggatttaactccttgactatcatggcggcgccagaaattaccatcaaaagcattaatacagttataccgatcgcagttagaacggttatagcatccaccatttatatctaaaaattagatcaaagaatatgtgacaaagtcctagttgtatactgagaattgacgaaacaatgtttcttacatatttttttcttattagtaaccgacttaatagtaggaactggaaaactagacttgattattctataagtatagatacccttccaaataatattctctttgataaaagttccagaaaatgtagaattttttaaaaagttatcttttgctattaccaagattgtgtttagacgcttattattaatatgagtgatgaaatccacaccgcctctagatatcgcctttatttccacattagatggtaaatccaatagtgaaactatctttttaggaatgtatggactcgcgtttagaggagtaaacgtcttaggcgtcggaaaggatgattcatcaaacgaataaacaatttcacaaatggatgttaatgtattagtaggaaattttttgacgctattggaattgaagattctaatggatgatgttctacctatttcatccgataacatgttaatttccgacaccaacggttttaatatttcgatgatatacggtagtctctctttcggacttatatagcttattccacaatacgagtcattatatactccaaaaaacaaaataactagtataaaatctgtatcgaatgggaaaaacgaaattatcgacataggtatagaatccggaacattgaacgtattaatacttaattctttttctgtggtaagtaccgataggttattgacattgtatggttttaaatattctataacttgagacttgatagatattagtgatgaattgaaaattatttttatcaccacgtgtgtttcaggatcatcgtcgacgcccgtcaaccaaccgaacggagtaaaataaatatcattaatatatgctctagatattagtatttttatcaatcctttgattatcatcttctcgtaggcgaatgattccatgatcaagagtgatttaagaacatcctccggagtattaatgggcttagtaaacagtccatcgttgcaataataaaagttatccaagttaaaggatattatgcattcgtttaaagatatcacctcatctgacggagacaattttttggtaggttttagagactttgaagctacttgtttaacaaagttattcatcgtcgtctactattctatttaattttgtagttaatttatcacatatcacattaattgactttttggtccacttttccatacgtttatattcttttaatcctgcgttatccgtttccgttatatccagggatagatcttgcaagttaaatagaatgctcttaaataatgtcattttcttatccgctaaaaatttaaagaatgtataaacctttttcagagatttgaaactcttaggtggtgtcctagtacacaatatcataaacaaactaataaacattccacattcagattccaacagctgattaacttccacattaatacagcctattttcgctccaaatgtacattcgaaaaatctgaataaaacatcgatgtcacaatttgtattatccaatacagaatgtttgtgattcgtgttaaaaccatcggagaaggaatagaaataaaaattattatagtggtggaattcagttggaatattgcctccggagtcataaaaggatactaaacattgttttttatcataaattacacatttccaatgagacaaataacaaaatccaaacattacaaatctagaggtagaacttttaattttgtctttaagtatatacgataagatatgtttattcataaacgcgtcaaatttttcatgaatcgctaaggagtttaagaatctcatgtcaaattgtcctatataatccacttcggatccataagcaaactgagagactaagttcttaatacttcgattgctcatccaggctcctctctcaggctctattttcatcttgacgacctttggattttcaccagtatgtattcctttacgtgataaatcatcgattttcaaatccatttgtgagaagtctatcgccttagatactttttcccgtagtcgaggtttaaaaaaatacgctaacggtatactagtaggtaactcaaagacatcatatatagaatggtaacgcgtctttaactcgtcggttaactctttcttttgatcgagttcgtcgctactattgggtctgctcaggtgccccgactctactagttccaacatcataccgataggaatacaagacactttgccggcggttgtagatttatcatatttttccactacatatccgttacaatttgttaaaaatttagatacatctatattgctacataatccagctagtgaatatatatgacataataaattggtaaatcctagttctggtattttactaattactaaatctgtatatctttccatttatcatggaaaagaatttaccagatatcttcttttttccaaactgcgttaatgtattctcttacaaatattcacaagatgaattcagtaatatgagtaaaacggaacgtgatagtttctcattggccgtgtttccagttataaaacatagatggcataacgcacacgttgtaaaacataaaggaatatacaaagttagtacagaagcacgtggaaaaaaagtatctcctccatcactaggaaaacccgcacacataaacctaaccgcgaagcaatatatatacagtgaacacacaataagctttgaatgttatagttttctaaaatgtataacaaatacagaaatcaattcgttcgatgagtatatattaagaggactattagaagctggtaatagtttacagatattttccaattccgtaggtaaacgaacagatactataggtgtactagggaataagtatccatttagcaaaattccattggcctcattaactcctaaagcacaacgagagatattttcagcgtggatttctcatagacctgtagttttaactggaggaactggagtgggtaagacgtcacaggtacccaagttattgctttggtttaattatttatttggtggattctctactctagataaaatcactgactttcacgaaagaccagtcattctatctcttcctaggatagctttagttagattgcatagcaataccattttaaaatcattgggatttaaggtactagatggatctcctatttctttacggtacggatctataccggaagaattaataaacaaacaaccaaaaaaatatggaattgtattttctacccataagttatctctaacaaaactatttagttatggcactcttattatagacgaagttcatgagcatgatcaaataggagatattattatagcagtagcgagaaagcatcatacgaaaatagattctatgtttttaatgactgccacgttagaggatgacagggaacggctaaaagtatttttacctaatcccgcatttatacatattcctggagatacactgtttaaaattagcgaggtatttattcataataagataaatccatcttccagaatggcatacatagaagaagaaaagagaaatttagttactgctatacagatgtatactcctcctgatggatcatccggtatagtctttgtggcatccgttgcacagtgtcacgaatataaatcatatttagaaaaaagattaccgtatgatatgtatattattcatggtaaggtcttagatatagacgaaatattagaaaaagtgtattcatcacctaatgtatcgataattatttctactccttatttggaatccagcgttactatacgcaatgttacacacatttatgatatgggtagagtttttgtccccgctccttttggaggatcgcaacaatttatttctaaatctatgagagatcaacgaaaaggaagagtaggaagagttaatcctggtacatacgtctatttctatgatctgtcttatatgaagtctatacagcgaatagattcagaatttctacataattatatattgtacgctaataagtttaatctaacactccccgaagatttgtttataatccctacaaatttggatattctatggcgtacaaaggaatatatagactcgttcgatattagtacagaaacatggaataaattattatccaattattatatgaagatgatagagtatgctaaactttatgtactaagtcctattctcgctgaggagttggataactttgagaggacgggagaattaactagtattgtacgagaagccattttatctctaaatttacaaattaagattttaaattttaaacataaagatgatgatacgtatatacacttttgtaaaatattattcggtgtctataacggaacaaacgctactatatattatcatagacctctaacgggatatatgaatatgatttcagatactatatttgttcctgtagataataactaaaaatcaaactctaatgaccacatctttttttagagatgaaaaattttccacatctccttttgtagacacgactaaacattttgcagaaaaaagtttattagtgtttagataatcgtatacttcatcagtgtagatagtaaatgtgaacagataaaaggtattcttgctcaatagattggtaaattccatagaatatattaatcctttcttcttgagatcccacatcatttcaaccagagacgttttatccaatgatttacctcgtactataccacatacaaaactagattttgcagtgacgtcgtacctggtattcctaccaaacaaaattttacttttagttcttttagaaaattctaaggtagaatctctatttgccaatatgtcatctatggaattaccactagcaaaaaatgatagaaatatatattgatacatcgcagctggttttgatctactatactttaaaaacgaatcagattccataattgcctgtatatcatcagctgaaaaactatgttttacacgtattccttcggcatttctttttaatgatatatcttgtttagacaatgataaagttatcatgtccatgagagacgcgtctccgtatcgtataaatatttcattagatgttagacgcttcattaggggtatacttctataaggtttcttaatcagtccatcattggttgcgtcaagaactactatcggatgttgttgggtatctctagtgttacacatggccttactaaagtttgggtaaataactatgatatctctattaattatagatgcatatatttcattcgtcaaggatattagtatcgacttgctatcgtcattaatacgtgtaatgtaatcatataaatcatgcgatagccaaggaaaatttaaatagatgttcatcatataatcgtcgctataattcatattaatacgttgacattgactaatttgtaatatagcctcgccacgaagaaagctctcgtattcagtttcatcgataaaggataccgttaaatataactggttgccgatagtctcatagtctattaagtggtaagtttcgtacaaatacagaatccctaaaatattatctaatgttggattaatctttaccataactgtataaaatggagacggagtcataactattttaccgtttgtacttactggaatagatgaaggaataatctccggacatgctggtaaagacccaaatgtctgtttgaagaaatccaatgttccaggtcctaatctcttaacaaaaattacgatattcgatcccgatatcctttgcattctatttaccagcatatcacgaactatattaagattatctatcatgtctattctcccaccgttatataaatcgcctccgctaagaaacgttagtatatccatacaatggaatacttcatttctaaaatagtattcgttttctaattctttaatgtgaaatcgtatactagaaagggaaaaattatctttgagttttccgttagaaaagaaccacgaaactaatgttctgattgcgtccgattccgttgctgaattaatggatttacaccaaaaactcatataacttctagatgtagaagcattcgctaaaaaattagtagaatcaaaggatataagtagatgttccaacaagtgagcaattcccaagatttcatctatatcattctcgaatccgaaattagaaattcccaagtagatatcctttttcatccgatcgttgatgaaaatacgaactttattcggtaagacaatcatttactaaggagtaaaataggaagtaatgttcgtatgtcgttatcatcgtataaattaaaggtgtgttttttaccattaagtgacattataattttaccaatattggaattataatataggtgtatttgcgcactcgcgacggttgatgcatcggtaaatatagctgtatctaatgttctagtcggtatttcatcatttcgctgtctaataatagcgttttctctatctgtttccattacagctgcctgaagtttattggtcggataatatgtaaaataataagaaatacatacgaataacaaaaataaaataagatataataaagatgccatttagagatctaattttgtttaacttgtccaaattcctacttacagaagatgaggaatcgttggagatagtgtcttccttatgtagaggatttgaaatatcttataatgacttgataacttactttccagataggaaataccataaatatatttataaagtatttgaacatgtagatttatcggaggaattaagtatggaattccatgatacaactctgagagatttagtctatcttagattgtacaagtattccaagtgtatacggccgtgttataaattaggagataatctaaaaggcatagttgttataaaggacaggaatatttatattagggaagcaaatgatgacttgatagaatatctcctcaaggaatacactcctcagatttatacatattctaatgagcgcgtccccataactggttcaaaattaattctttgtggattttctcaagttacatttatggcgtatacaacgtcgcatataacaacaaataaaaaggtagatgttctcgtttccaaaaaatgtatagatgaactagtcgatccaataaattatcaaatacttcaaaatttatttgataaaggaagcggaacaataaacaaaatactcaggaagatattttattcggtaacaggtggccaaactccataggtagctttttctatttcggattttagaatttccaaattcaccagcgatttatcggttttggtgaaatccaaggatttattaatgtccacaaatgccatttgttttgtctgtggattgtatttgaaaatggaaacgatgtagttagatagatgcgctgcgaagtttcctattagggttccgcgcttcacgtcacccagcatacttgaatcaccatcctttaaaaaaaatgataagatatcaacatggagtatatcatactcgaattttaattcttctactgactcactgacattttcacaaatactacaatacggtttaccgaaaataatcagtacgttcttcatttatgggtatcaaaaacttaaaatcgttactgctggaaaataaatcactgacgatattagatgataatttatacaaagtatacaatggaatatttgtggatacaatgagtatttatatagccgtcgccaattgtgtcagaaacttagaagagttaactacggtattcataaaatacgtaaacggatgggtaaaaaagggagggcatgtaaccctttttatcgatagaggaagtataaaaattaaacaagacgttagagacaagagacgtaaatattctaaattaaccaaggacagaaaaatgttagaattagaaaagtgtacatccgaaatacaaaatgttaccggatttatggaagaagaaataaaggcagaaatgcaattaaaaatcgataaactcacatttcaaatatatttatctgattctgataacataaaaatatcattgaatgagatactaacacatttcaacaataatgagaatgttacattattttattgtgatgaacgagacgcagaattcgttatgtgtctcgaggctaaaacacatttctctaccacaggagaatggccgttgataataagtaccgatcaggatactatgctatttgcatctgctgataatcatcctaagatgataaaaaacttaactcaactgtttaaatttgttccctcggcagaggataactatttagcaaaattaacggcgttagtgaatggatgtgatttctttcctggactctatggggcatctataacacccaccaacttaaacaaaatacaattgtttagtgattttacaatcgataatatagtcactagtttggcaattaaaaattattatagaaagactaactctaccgtagacgtgcgtaatattgttacgtttataaacgattacgctaatttagacgatgtctactcgtatattcctccttgtcaatgcactgttcaagaatttatattttccgcattagatgaaaaatggaatgaatttaaatcatcttatttagaaagcgtgccgttaccctgccaattaatgtacgcgttagaaccacgcaaggagattgatgtttcagaagttaaaactttatcatcttatatagatttcgaaaatactaaatcagatatcgatgttataaaatctatatcctcgatcttcggatattctaacgaaaactgtaacacgatagtattcggcatctataaggataatttactactgagtataaataattcattttactttaacgatagtctgttaataaccaatactaaaagtgataatataataaatataggttactagattaaaaatggtgttccaactcgtgtgctctacatgcggtaaagatatttctcacgaacgatataaattgattatacgaaaaaaatcattaaaggatgtactcgtcagtgtaaagaacgaatgttgtaggttaaaattatctacacaaatagaacctcaacgtaacttaacagtgcaacctctattggatataaactaatatggatccggttaattttatcaagacatatgcgcctagaggttctattatttttattaattataccatgtcattaacaagtcatttgaatccatcgatagaaaaacatgtgggtatttattatggtacgttattatcggaacacttggtagttgaatctacctatagaaaaggagttcgaatagtcccattggatagtttttttgaaggatatcttagtgcaaaagtatacatgttagagaatattcaagttatgaaaatagcagctgatacgtcattaactttattgggtattccgtatggatttggtcatgatagaatgtattgttttaaattggtagctgactgttataaaaatgccggtattgatacatcgtctaaacgaatattgggcaaagatatttttctgagccaaaacttcacagacgataatagatggataaagatatatgattctaataatttaacattttggcaaattgattaccttaaagggtgagttaatatgcataactactcctccgttgttttttccctcgttctttttcttaacgttgtttgccatcactctcataatgtaaagatattctaaaatggtaaacttttgcatatcggacgcagaaattggtataaatgttgtaattgtattatttcccgtcaatggactagtcacagctccatcagttttatatcctttagagtatttctcactcgtgtctaacattctagagcattccatgatctgtttatcgttgatattggccggaaagatagattttttattttttattatattactattggcaattgtagatataacttctggtaaatatttttctaccttttcaatctcttctattttcaagccggctatatattctgctatattgttgctagtatcaataccttttctggctaagaagtcatatgtggtattcactatatcagttttaactggtagttccattagcctttccacttctgcagaataatcagaaattggttctttaccagaaaatccagctactataataggctcaccgatgatcattggcaaaatcctatattgtaccagattaatgagagcatatttcatttccaataattctgctagttcttgagacattgatttatttgatgaatctagttggttctctagatactctaccatttctgccgcatacaataacttgttagataaaatcagggttatcaaagtgtttagcgtggctagaatagtgggcttgcatgtattaaagaatgcggtagtatgagtaaaccgttttaacgaattatatagtctccagaaatctgtggcgttacatacatgagccgaatgacatcgaagattgtccaatatttttaatagctgctctttgtccattatttctatatttgactcgcaacaattgtagataccattaatcaccgattcctttttcgatgccggacaatagcacaattgtttagctttggactctatgtattcagaattaatagatatatctctcaatacagattgcactatacattttgaaactatgtcaaaaattgtagaacgacgctgttctgcagccatttaactttaaataatttacaaaaatttaaaatgagcatccgtataaaaatcgataaactgcgccaaattgtggcatatttttcagagttcagtgaagaagtgtctataaatgtagactcgacggatgagttaatgtatatttttgccgccttgggcggatctgtaaacatttgggcaattatacctctaagtgcatcagtgttttaccgaggagccgaaaatattgtgtttaatcttcctgtgtccaaggtaaaatcgtgtttgtgtagttttcacaatgatgccatcatagatatagaacctgatctggaaaataatctagtaaaactttctagttatcatgtagtaagtgtcgattgtaacaaggaactgatgcctattaggacagatactactatttgtctaagtatagatcaaaagaaatcttacgtgtttaattttcacaagtatgaagaaaaatgttgtggtagaaccgtcattcatctagaatggttgttgggctttatcaagtgtattagtcagcatcagcatctggctattatgtttaaagatgacaatattattatgaagactcctggtaatactgatgcgttttccagggaatattctatgactgaatgttctcaagaactacaaaagttttctttcaaaatagctatctcgtctctcaacaaactacgaggattcaaaaagagagtcaatgtttttgaaactagaatcgtaatggataatgacgataacattttaggaatgttgttttcggatagagttcaatcctttaagatcaacatctttatggcgtttttagattaatactttcaatgagataaatatgggtggcggagtaagtgttgagctccctaaacgggatccgcctccgggagtacccactgatgagatgttattaaacgtggataaaatgcatgacgtgatagctcccgctaagcttttagaatatgtgcatataggaccactagcaaaagataaagaggataaagtaaagaaaagatatccagagtttagattagtcaacacaggacccggtggtctttcggcattgttaagacaatcgtataatggaaccgcacccaattgctgtcgcacttttaatcgtactcattattggaagaaggatggaaagatatcagataagtatgaagagggtgcagtattagaatcgtgttggccagacgttcacgacactggaaaatgcgatgttgatttattcgactggtgtcagggggatacgttcgatagaaacatatgccatcagtggatcggttcagcctttaataggagtaatagaactgtagagggtcaacaatcgttaataaatctgtataataagatgcaaacattatgtagtaaagatgctagtgtaccaatatgcgaatcatttttgcattatttacgcgcacacaatacagaagatagcaaagagatgatcgattatattctaagacaacagtctgcggactttaaacagaaatatatgagatgtagttatcccactagagataagttagaagagtcattaaaatatgcggaacctcgagaatgttgggatccagagtgttcgaatgccaatgttaatttcttactaacacgtaattataataatttaggactttgcaatattgtacgatgtaataccagcgtgaacaacttacagatggataaaacttcctcattaagattgtcatgtggattaagcaatagtgatagattttctactgttcccgtcaatagagcaaaagtagttcaacataatattaaacactcgttcgacctaaaattgcatttgatcagtttattatctctcttggtaatatggatactaattgtagctatttaaatgggtgccgcggcaagcatacagacgacggtgaatacactcagcgaacgtatctcgtctaaattagaacaagaagcgaacgctagtgctcaaacaaaatgtgatatagaaatcggaaatttttatatccgacaaaaccatggatgtaacctcactgttaaaaatatgtgctctgcggacgcggatgctcagttggatgctgtgttatcagccgctacagaaacatatagtggattaacaccggaacaaaaagcatacgtgccagctatgtttactgctgcgttaaacattcagacgagtgtaaacactgttgttagagattttgaaaattatgtgaaacagacttgtaattctagcgcggtcgtcgataacaaattaaagatacaaaacgtaatcatagatgaatgttacggagccccaggatctccaacaaatttggaatttattaatacaggatctagcaaaggaaattgtgccattaaagcgttgatgcaattgacgactaaggccactactcaaatagcacctagacaagttgctggtacaggagttcagttttatatgattgttatcggtgttataatattggcagcgttgtttatgtactatgccaagcgtatgttgttcacatccaccaatgataaaatcaaacttattttagccaataaggaaaacgtccattggactacttacatggacacattctttagaacttctccgatggttattgctaccacggatatgcaaaactgaaaatatattgataatattttaatagattaacatggaagttatcgctgatcgtctagacgatatagtgaaacaaaatatagcggatgaaaaatttgtagattttgttatacacggtctagagcatcaatgtcctgctatacttcgaccattaattaggttgtttattgatatactattatttgttatagtaatttatatttttacggtacgtctagtaagtagaaattatcaaatgttgttggtggtgctagtcatcacattaactattttttattactttatactataatagtactagactgacttctaacaaacatctcacctgccataaataaatgcttgatattaaagtcttctatttctaacactattccatctgtggaaaataatactctgacattatcgctaattgacacatcggtgagtgatatgcctataaagtaataatcttctttgggcacatataccagtgtaccaggttctaacaacctatttactggtgctcctgtagcatactttttctttaccttgagaatatccatcgtttgcttggtcaatagcgatatgtgattttttatcaaccactcaaaaaagtaattggagtgttcatatcctctacgggctattgtctcatggccgtgtatgaaatttaagtaacacgactgtggtagatttgttctatagagccgattgccgcaaatagatagaactaccaatatgtctgtacaaatgttaaacattaattgattaacagaaaaaacaatgttcgttctgggaatagaaaccagatcaaaacaaaattcgttagaatatatgccacgtttatacatggaatataaaataactacagtttgaaaaataacagtatcatttaaacatttaacttgcggggttaatctcacaactttactgtttttgaactgttcaaaatatagcatcgatccgtgagaaatacgtttagccgcctttaatagaggaaatcccaccgcctttctggatctcaccaacgacgatagttctgaccagcaactcatttcttcatcatccacctgttttaacatataataggcaggagatagatatccgtcattgcaatattccttctcgtaggcacacaatctaatattgataaaatctccattctcttctctgcatttattatcttgtctcggtggctgattaggctgtggtcttggtttaggccttggtctatcgttgttgaatctattttggtcattaaatctttcatttcttcctggtatatttctatcacctcgtttggttggatttttgtctatattatcgtttgtaacatcggtacgggtattcatttatcacaaaaaaaacttctctaaatgagtctactgctagaaaacctcatcgaagaagataccatattttttgcaggaagtatatctgagtatgatgatttacaaatggttattgccggcgcaaaatccaaatttccaagatctatgctttctatttttaatatagtacctagaacgatgtcaaaatatgagttggagttgattcataacgaaaatatcacaggagcaatgtttaccacaatgtataatataagaaacaatttgggtctaggagatgataaactaactattgaagccattgaaaactatttcttggatcctaacaatgaagttatgcctcttattattaataatacggatatgactgccgtcattcctaaaaaaagtggtaggagaaagaataagaacatggttatcttccgtcaaggatcatcacctatcttgtgcattttcgaaactcgtaaaaagattaatatttataaagaaaatatggaatccgcgtcgactgagtatacacctatcggagacaacaaggctttgatatctaaatatgcgggaattaatgtcctgaatgtgtattctccttccacatccataagattgaatgccatttacggattcaccaataaaaataaactagagaaacttagtactaataaggaactagaatcgtatagttctagccctcttcaagaacccattaggttaaatgattttctgggactattggaatgtgttaaaaagaatattcctctaacagatattccgacaaaggattgattactataaatggagaatgttcctaatgtatactttaatcctgtgtttatagagcccacgtttaaacattctttattaagtgtttataaacacagattaatagttttatttgaagtattcgttgtattcattctaatatatgtattttttagatctgaattaaatatgttcttcatgcctaaacgaaaaatacccgatcctattgatagattacgacgtgctaatctagcgtgtgaagacgataaattaatgatctatggattaccatggatgacaactcaaacatctgcgttatcaataaatagtaaaccgatagtgtataaagattgtgcaaagcttttgcgatcaataaatggatcacaaccagtatctcttaacgatgttcttcgcagatgatgattcattttttaagtatttggctagtcaagatgatgaatcttcattatctgatatattgcaaatcactcaatatctagactttctgttattattattgatccaatcaaaaaataaattagaagctgtgggtcattgttatgaatctctttcagaggaatacagacaattgacaaaattcacagactttcaagattttaaaaaactgtttaacaaggtccctattgttacagatggaagggtcaaacttaataaaggatatttgttcgactttgtgattagtttgatgcgattcaaaaaagaatcctctctagctaccaccgcaatagatcctgttagatacatagatcctcgtcgcaatatcgcattttctaacgtgatggatatattaaagtcgaataaagtgaacaataattaattctttattgtcatcatgaacggcggacatattcagttgataatcggccccatgttttcaggtaaaagtacagaattaattagacgagttagacgttatcaaatagctcaatataaatgcgtgactataaaatattctaacgataatagatacggaacgggactatggacgcatgataagaataattttgaagcattggaagcaactaaactatgtgatgtcttggaatcaattacagatttctccgtgataggtatcgatgaaggacagttctttccagacattgttgaattagatcgataaaaattaattaattacccgggtaccaggcctagatctgtcgagatccggtggtggtgcaaatcaaagaactgctcctcagtggatgttgcctttacttctaggcctgtacggaagtgttacttctgctctaaaagctgctgcagggggggggggggggtgggggggccggttagggccgccatcccctcagagcgtcgggatatcgggtggcggctcgggacggaggacgcgctagtgttcttctgtgtggcagttcagaatgatggatcaagctagatcagcattctctaacttgtttggtggagaaccattgtcatatacccggttcagcctggctcggcaagtagatggcgataacagtcatgtggagatgaaacttgctgtagatgaagaagaaaatgctgacaataacacaaaggccaatgtcacaaaaccaaaaaggtgtagtggaagtatctgctatgggactattgctgtgatcgtctttttcttgattggatttatgattggctacttgggctattgtaaaggggtagaaccaaaaactgagtgtgagagactggcaggaaccgagtctccagtgagggaggagccaggagaggacttccctgcagcacgtcgcttatattgggatgacctgaagagaaagttgtcggagaaactggacagcacagacttcaccagcaccatcaagctgctgaatgaaaattcatatgtccctcgtgaggctggatctcaaaaagatgaaaatcttgcgttgtatgttgaaaatcaatttcgtgaatttaaactcagcaaagtctggcgtgatcaacattttgttaagattcaggtcaaagacagcgctcaaaactcggtgatcatagttgataagaacggtagacttgtttacctggtggagaatcctgggggttatgtggcgtatagtaaggctgcaacagttactggtaaactggtccatgctaattttggtactaaaaaagattttgaggatttatacactcctgtgaatggatctatagtgattgtcagagcagggaaaatcacctttgcagaaaaggttgcaaatgctgaaagcttaaatgcaattggtgtgttgatatacatggaccagactaaatttcccattgttaacgcagaactttcattctttggacatgctcatctggggacaggtgacccttacacacctggattcccttccttcaatcacactcagtttccaccatctcggtcatcaggattgcctaatatacctgtccagacaatctccagagctgctgcagaaaagctgtttgggaatatggaaggagactgtccctctgactggaaaacagactctacatgtaggatggtaacctcagaaagcaagaatgtgaagctcactgtgagcaatgtgctgaaagagataaaaattcttaacatctttggagttattaaaggctttgtagaaccagatcactatgttgtagttggggcccagagagatgcatggggccctggagctgcaaaatccggtgtaggcacagctctcctattgaaacttgcccagatgttctcagatatggtcttaaaagatgggtttcagcccagcagaagcattatctttgccagttggagtgctggagactttggatcggttggtgccactgaatggctagagggatacctttcgtccctgcatttaaaggctttcacttatattaatctggataaagcggttcttggtaccagcaacttcaaggtttctgccagcccactgttgtatacgcttattgagaaaacaatgcaaaatgtgaagcatccggttactgggcaatttctatatcaggacagcaactgggccagcaaagttgagaaactcactttagacaatgctgctttccctttccttgcatattctggaatcccagcagtttctttctgtttttgcgaggacacagattatccttatttgggtaccaccatggacacctataaggaactgattgagaggattcctgagttgaacaaagtggcacgagcagctgcagaggtcgctggtcagttcgtgattaaactaacccatgatgttgaattgaacctggactatgagaggtacaacagccaactgctttcatttgtgagggatctgaaccaatacagagcagacataaaggaaatgggcctgagtttacagtggctgtattctgctcgtggagacttcttccgtgctacttccagactaacaacagatttcgggaatgctgagaaaacagacagatttgtcatgaagaaactcaatgatcgtgtcatgagagtggagtatcacttcctctctccctacgtatctccaaaagagtctcctttccgacatgtcttctggggctccggctctcacacgctgccagctttactggagaacttgaaactgcgtaaacaaaataacggtgcttttaatgaaacgctgttcagaaaccagttggctctagctacttggactattcagggagctgcaaatgccctctctggtgacgtttgggacattgacaatgagttttaaatgtgatacccatagcttccatgagaacagcagggtagtctggtttctagacttgtgctgatcgtgctaaattttcagtagggctacaaaacctgatgttaaaattccatcccatcatcttggtactactagatgtctttaggcagcagcttttaatacagggtagataacctgtacttcaagttaaagtgaataaccacttaaaaaatgtccatgatggaatattcccctatctctagaattttaagtgctttgtaatgggaactgcctctttcctgttgttgttaatgaaaatgtcagaaaccagttatgtgaatgatctctctgaatcctaagggctggtctctgctgaaggttgtaagtggtcgcttactttgagtgatcctccaacttcatttgatgctaaataggagataccaggttgaaagaccttctccaaatgagatctaagcctttccataaggaatgtagctggtttcctcattcctgaaagaaacagttaactttcagaagagatgggcttgttttcttgccaatgaggtctgaaatggaggtccttctgctggataaaatgaggttcaactgttgattgcaggaataaggccttaatatgttaacctcagtgtcatttatgaaaagaggggaccagaagccaaagacttagtatattttcttttcctctgtcccttcccccataagcctccatttagttctttgttatttttgtttcttccaaagcacattgaaagagaaccagtttcaggtgtttagttgcagactcagtttgtcagactttaaagaataatatgctgccaaattttggccaaagtgttaatcttaggggagagctttctgtccttttggcactgagatatttattgtttatttatcagtgacagagttcactataaatggtgtttttttaatagaatataattatcggaagcagtgccttccataattatgacagttatactgtcggttttttttaaataaaagcagcatctgctaataaaacccaacagatactggaagttttgcatttatggtcaacacttaagggttttagaaaacagccgtcagccaaatgtaattgaataaagttgaagctaagatttagagatgaattaaatttaattaggggttgctaagaagcgagcactgaccagataagaatgctggttttcctaaatgcagtgaattgtgaccaagttataaatcaatgtcacttaaaggctgtggtagtactcctgcaaaattttatagctcagtttatccaaggtgtaactctaattcccattttgcaaaatttccagtacctttgtcacaatcctaacacattatcgggagcagtatcttccataatgtataaagaacaaggtagtttttacctaccacagtgtctgtatcggagacagtgatctccatatgttacactaagggtgtaagtaattatcgggaacagtgtttcccataattttcttcatgcaatgacatcttcaaagcttgaagatcgttagtatctaacatgtatcccaactcctataattccctatcttttagttttagttgcagaaacattttgtggtcattaagcattgggtgggtaaattcaaccactgtaaaatgaaattactacaaaatttgaaatttagcttgggtttttgttacctttatggtttctccaggtcctctacttaatgagatagtagcatacatttataatgtttgctattgacaagtcattttaactttatcacattatttgcatgttacctcctataaacttagtgcggacaagttttaatccagaattgaccttttgacttaaagcagagggactttgtatagaaggtttgggggctgtggggaaggagagtcccctgaaggtctgacacgtctgcctacccattcgtggtgatcaattaaatgtaggtatgaataagttcgaagctccgtgagtgaaccatcattataaacgtgatgatcagctgtttgtcatagggcagttggaaacggcctcctagggaaaagttcatagggtctcttcaggttcttagtgtcacttacctagatttacagcctcacttgaatgtgtcactactcacagtctctttaatcttcagttttatctttaatctcctcttttatcttggactgacatttagcgtagctaagtgaaaaggtcatagctgagattcctggttcgggtgttacgcacacgtacttaaatgaaagcatgtggcatgttcatcgtataacacaatatgaatacagggcatgcattttgcagcagtgagtctcttcagaaaacccttttctacagttagggttgagttacttcctatcaagccagtacgtgctaacaggctcaatattcctgaatgaaatatcagactagtgacaagctcctggtcttgagatgtcttctcgttaaggagatgggccttttggaggtaaaggataaaatgaatgagttctgtcatgattcactattctagaacttgcatgacctttactgtgttagctctttgaatgttcttgaaattttagactttctttgtaaacaaatgatatgtccttatcattgtataaaagctgttatgtgcaacagtgtggagattccttgtctgatttaataaaatacttaaacactgaaaaaaaaaaaaaaaaaaaaaaaaaaaaaaaaaaaaaaaaaaaaaaaaaaaaaaaaaaaaaaaaaaaaaaaaaaaaaaaaagtaccttctgaggcggaaagaaccagccggatctcgacttcgagcttatttatattccaaaaaaaaaaaataaaatttcaatttttaagctttcactaattccaaacccacccgctttttatagtaagtttttcacccataaataataaatacaataattaatttctcgtaaaagtagaaaatatattctaatttattgcacggtaaggaagtagatcataactcgagcatgggagatcccgtcgttttacaacgtcgtgactgggaaaaccctggcgttacccaacttaatcgccttgcagcacatccccctttcgccagctggcgtaatagcgaagaggcccgcaccgatcgcccttcccaacagttgcgcagcctgaatggcgaatggcgctttgcctggtttccggcaccagaagcggtgccggaaagctggctggagtgcgatcttcctgaggccgatactgtcgtcgtcccctcaaactggcagatgcacggttacgatgcgcccatctacaccaacgtgacctatcccattacggtcaatccgccgtttgttcccacggagaatccgacgggttgttactcgctcacatttaatgttgatgaaagctggctacaggaaggccagacgcgaattatttttgatggcgttaactcggcgtttcatctgtggtgcaacgggcgctgggtcggttacggccaggacagtcgtttgccgtctgaatttgacctgagcgcatttttacgcgccggagaaaaccgcctcgcggtgatggtgctgcgctggagtgacggcagttatctggaagatcaggatatgtggcggatgagcggcattttccgtgacgtctcgttgctgcataaaccgactacacaaatcagcgatttccatgttgccactcgctttaatgatgatttcagccgcgctgtactggaggctgaagttcagatgtgcggcgagttgcgtgactacctacgggtaacagtttctttatggcagggtgaaacgcaggtcgccagcggcaccgcgcctttcggcggtgaaattatcgatgagcgtggtggttatgccgatcgcgtcacactacgtctgaacgtcgaaaacccgaaactgtggagcgccgaaatcccgaatctctatcgtgcggtggttgaactgcacaccgccgacggcacgctgattgaagcagaagcctgcgatgtcggtttccgcgaggtgcggattgaaaatggtctgctgctgctgaacggcaagccgttgctgattcgaggcgttaaccgtcacgagcatcatcctctgcatggtcaggtcatggatgagcagacgatggtgcaggatatcctgctgatgaagcagaacaactttaacgccgtgcgctgttcgcattatccgaaccatccgctgtggtacacgctgtgcgaccgctacggcctgtatgtggtggatgaagccaatattgaaacccacggcatggtgccaatgaatcgtctgaccgatgatccgcgctggctaccggcgatgagcgaacgcgtaacgcgaatggtgcagcgcgatcgtaatcacccgagtgtgatcatctggtcgctggggaatgaatcaggccacggcgctaatcacgacgcgctgtatcgctggatcaaatctgtcgatccttcccgcccggtgcagtatgaaggcggcggagccgacaccacggccaccgatattatttgcccgatgtacgcgcgcgtggatgaagaccagcccttcccggctgtgccgaaatggtccatcaaaaaatggctttcgctacctggagagacgcgcccgctgatcctttgcgaatacgcccacgcgatgggtaacagtcttggcggtttcgctaaatactggcaggcgtttcgtcagtatccccgtttacagggcggcttcgtctgggactgggtggatcagtcgctgattaaatatgatgaaaacggcaacccgtggtcggcttacggcggtgattttggcgatacgccgaacgatcgccagttctgtatgaacggtctggtctttgccgaccgcacgccgcatccagcgctgacggaagcaaaacaccagcagcagtttttccagttccgtttatccgggcaaaccatcgaagtgaccagcgaatacctgttccgtcatagcgataacgagctcctgcactggatggtggcgctggatggtaagccgctggcaagcggtgaagtgcctctggatgtcgctccacaaggtaaacagttgattgaactgcctgaactaccgcagccggagagcgccgggcaactctggctcacagtacgcgtagtgcaaccgaacgcgaccgcatggtcagaagccgggcacatcagcgcctggcagcagtggcgtctggcggaaaacctcagtgtgacgctccccgccgcgtcccacgccatcccgcatctgaccaccagcgaaatggatttttgcatcgagctgggtaataagcgttggcaatttaaccgccagtcaggctttctttcacagatgtggattggcgataaaaaacaactgctgacgccgctgcgcgatcagttcacccgtgcaccgctggataacgacattggcgtaagtgaagcgacccgcattgaccctaacgcctgggtcgaacgctggaaggcggcgggccattaccaggccgaagcagcgttgttgcagtgcacggcagatacacttgctgatgcggtgctgattacgaccgctcacgcgtggcagcatcaggggaaaaccttatttatcagccggaaaacctaccggattgatggtagtggtcaaatggcgattaccgttgatgttgaagtggcgagcgatacaccgcatccggcgcggattggcctgaactgccagctggcgcaggtagcagagcgggtaaactggctcggattagggccgcaagaaaactatcccgaccgccttactgccgcctgttttgaccgctgggatctgccattgtcagacatgtataccccgtacgtcttcccgagcgaaaacggtctgcgctgcgggacgcgcgaattgaattatggcccacaccagtggcgcggcgacttccagttcaacatcagccgctacagtcaacagcaactgatggaaaccagccatcgccatctgctgcacgcggaagaaggcacatggctgaatatcgacggtttccatatggggattggtggcgacgactcctggagcccgtcagtatcggcggaattccagctgagcgccggtcgctaccattaccagttggtctggtgtcaaaaataataataaccgggcaggggggatccaattctgtgagcgtatggcaaacgaaggaaaaatagttatagtagccgcactcgatgggacatttcaacgtaaaccgtttaataatattttgaatcttattccattatctgaaatggtggtaaaactaactgctgtgtgtatgaaatgctttaaggaggcttccttttctaaacgattgggtgaggaaaccgagatagaaataataggaggtaatgatatgtatcaatcggtgtgtagaaagtgttacatcgactcataatattatattttttatctaaaaaactaaaaataaacattgattaaattttaatataatacttaaaaatggatgttgtgtcgttagataaaccgtttatgtattttgaggaaattgataatgagttagattacgaaccagaaagtgcaaatgaggtcgcaaaaaaactgccgtatcaaggacagttaaaactattactaggagaattattttttcttagtaagttacagcgacacggtatattagatggtgccaccgtagtgtatataggatctgctcccggtacacatatacgttatttgagagatcatttctataatttaggagtgatcatcaaatggatgctaattgacggccgccatcatgatcctattttaaatggattgcgtgatgtgactctagtgactcggttcgttgatgaggaatatctacgatccatcaaaaaacaactgcatccttctaagattattttaatttctgatgtgagatccaaacgaggaggaaatgaacctagtacggcggatttactaagtaattacgctctacaaaatgtcatgattagtattttaaaccccgtggcgtctagtcttaaatggagatgcccgtttccagatcaatggatcaaggacttttatatcccacacggtaataaaatgttacaaccttttgctccttcatattcagctgaaatgagattattaagtatttataccggtgagaacatgagactgactcgagttaccaaattagacgctgtaaattatgaaaaaaagatgtactaccttaataagatcgtccgtaacaaagtagttgttaactttgattatcctaatcaggaatatgactattttcacatgtactttatgctgaggaccgtgtactgcaataaaacatttcctactactaaagcaaaggtactatttctacaacaatctatatttcgtttcttaaatattccaacaacatcaactgaaaaagttagtcatgaaccaatacaacgtaaaatatctagcaaaaattctatgtctaaaaacagaaatagcaagagatccgtacgcggtaataaatagaaacgtactactgagatatactaccgatatagagtataatgatttagttactttaataaccgttagacataaaattgattctatgaaaactgtgtttcaggtatttaacgaatcatccataaattatactccggttgatgatgattatggagaaccaatcattataacatcgtatcttcaaaaaggtcataacaagtttcctgtaaattttctatacatagatgtggtaatatctgacttatttcctagctttgttagactagatactacagaaactaatatagttaatagtgtactacaaacaggcgatggtaaaaagactcttcgtcttcccaaaatgttagagacggaaatagttgtcaagattctctatcgccctaatataccattaaaaattgttagatttttccgcaataacatggtaactggagtagagatagccgatagatctgttatttcagtcgctgattaatcaattagtagagatgagataagaacattataataatcaataatatatcttatatcttatatcttatatcttatatcttgtttagaaaaatgctaatattaaaatagctaacgctagtaatccaatcggaagccatttgatatctataatagggtatctaatttcctgatttaaatagcggacagctatattctcggtagctactcgtttggaatcacaaacattatttacatctaatttactatctgtaatggaaacgtttcccaatgaaatggtacaatccgatacattgcattttgttatatttttttttaaagaggctggtaacaacgcatcgcttcgtttacatggctcgtaccaacaataatagggtaatcttgtatctattcctatccgtactatgcttttatcaggataaatacatttacatcgtatatcgtctttgttagcatcacagaatgcataaatttgttcgtccgtcatgataaaaatttaaagtgtaaatataactattatttttatagttgtaataaaaagggaaatttgattgtatactttcggttctttaaaagaaactgacttgataaaaatggctgtaatctctaaggttacgtatagtctatatgatcaaaaagagattaatgctacagatattatcattagtcatgttaaaaatgacgacgatatcggtaccgttaaagatggtagactaggtgctatggatggggcattatgtaagacttgtgggaaaacggaattggaatgtttcggtcactggggtaaagtaagtatttataaaactcatatagttaagcctgaatttatttcagaaattattcgtttactgaatcatatatgtattcactgcggattattgcgttcacgagaaccgtattccgacgatattaacctaaaagagttatcgggacacgctcttaggagattaaaggataaaatattatccaagaaaaagtcatgttggaacagtgaatgtatgcaaccgtatcaaaaaattactttttcaaagaaaaaggtttgtttcgtcaacaagttggatgatattaacgttcctaattctctcatctatcaaaagttaatttctattcatgaaaagttttggccattattagaaattcatcaatatccagctaacttattttatacagactactttcccatccctccgttgattattagaccggctattagtttttggatagatagtatacccaaagagaccaatgaattaacttacttattaggtatgatcgttaagaattgtaacttgaatgctgatgaacaggttatccagaaggcggtaatagaatacgatgatattaaaattatttctaataacactaccagtatcaatttatcatatattacatccggcaaaaataatatgattagaagttatatcgtcgcccgacgaaaagatcagaccgctagatctgtaattggtcccagtacatctatcaccgttaatgaggtaggaatgcccgcatatattagaaatacacttacagaaaagatatttgttaatgcctttacagtggataaagttaaacaactattagcgtcaaaccaagttaaattttactttaataaacgattaaaccaattaacaagaatacgccaaggaaagtttattaaaaataaaatacatttattgcctggtgattgggtagaagtagctgttcaagaatatacaagtattatttttggaagacagccgtctctacatagatacaacgtcatcgcttcatctatcagagctaccgaaggagatactatcaaaatatctcccggaattgccaactctcaaaatgctgatttcgacggggatgaggaatggatgatattagaacaaaatcctaaagctgtaattgaacaaagtattcttatgtatccgacgacgttactcaaacacgatattcatggagcccccgtttatggatctattcaagatgaaatcgtagcagcgtattcattgtttaggatacaagatctttgtttagatgaagtattgaacatcttggggaaatatggaagagagttcgatcctaaaggtaaatgtaaattcagcggtaaagatatctatacttacttgataggtgaaaagattaattatccgggtctcttaaaggatggtgaaattattgcaaacgacgtagatagtaattttgttgtggctatgaggcatctgtcattggctggactcttatccgatcataagtcgaacgtggaaggtatcaactttattatcaagtcatcttatgtttttaagagatatctatctatttacggttttggggtgacattcaaagatctgagaccaaattcgacgttcactaataaattggaggccatcaacgtagaaaaaatagaacttatcaaagaagcatacgccaaatatctcaacgatgtaagagacgggaaaatagttccattatctaaagctttagaggcggactatgtggaatccatgttatccaacttgacaaatcttaatatccgagagatagaagaacatatgagacaaacgctgatagatgatccagataataacctcctgaaaatggccaaagcgggttataaagtaaatcccacagaactaatgtatattctaggtacgtatggacaacaaaggattgatggtgaaccagcagagactcgagtattgggtagagttttaccttactatcttccagactctaaggatccagaaggaagaggttacattcttaattctttaacaaaaggattaacgggttctcaatattacttttcgatgctggttgccagatctcaatctactgatatcgtctgtgaaacatcacgtaccggaacactggctagaaaaatcattaaaaagatggaggatatggtggtcgacggatacggacaagtagttataggtaatacgctcatcaagtacgccgccaattataccaaaattctaggctcagtatgtaaacctgtagatcttatctatccagatgagtccatgacttggtatttggaaattagtgctctgtggaataaaataaaacagggattcgtttactctcagaaacagaaacttgcaaagaagacattggcgccgtttaatttcctagtattcgtcaaacccaccactgaggataatgctattaaggttaaggatctgtacgatatgattcataacgtcattgatgatgtgagagagaaatacttctttacggtatctaatatagattttatggagtatatattcttgacgcatcttaatccttctagaattagaattacaaaagaaacggctatcactatctttgaaaagttctatgaaaaactcaattatactctaggtggtggaactcctattggaattatttctgcacaggtattgtctgagaagtttacacaacaagccctgtccagttttcacactactgaaaaaagtggtgccgtcaaacaaaaacttggtttcaacgagtttaataacttgactaatttgagtaagaataagaccgaaattatcactctggtatccgatgatatctctaaacttcaatctgttaagattaatttcgaatttgtatgtttgggagaattaaatccaaacatcactcttcgaaaagaaacagataaatatgtagtagatataatagtcaatagattatacatcaagagagcagaaataaccgaattagtcgtcgaatatatgattgaacgatttatctcctttagcgtcattgtaaaggaatggggtatggagacattcattgaggacgaggataatattagatttactgtctacctaaatttcgttgaaccggaagaattgaatcttagtaagtttatgatggttcttccgggggcagccaacaagggaaagattagtaaattcaagattcctatctctgattatacgggatatgacgacttcaatcaaacaaaaaagctcaataagatgactgtagaactcatgaatctaaaagaattgggttctttcgatttggaaaacgtcaacgtgtatcctggagtatggaatacatacgatatcttcggtatcgaggccgctcgtgaatacttgtgcgaagccatgttaaacacctatggagaagggttcgattatctgtatcagccttgtgatcttctcgctagtttactatgtgctagttacgaaccagaatcagtgaataaattcaagttcggcgcagctagtactcttaagagagctacgttcggagacaataaagcattgttaaacgcggctcttcataaaaagtcagaacctattaacgataatagtagctgccacttttttagcaaggtccctaatataggaactggatattacaaatactttatcgacttgggtcttctcatgagaatggaaaggaaactatctgataagatatcttctcaaaagatcaaggaaatggaagaaacagaagacttttaattcttatcaataacatatttttctatgatctgtcttttaaacgatggattttccacaaatgcgcctctcaagtccctcatagaatgatacacgtataaaaaatatagcataggcaatgactccttatttttagacattagatatgccaaaatcatagccccgcttctatttactcccgcagcacaatgaaccaacacgggctcgtttcgttgatcacatttagataaaaaggcggttacgtcgtcaaaatatttactaatatcggtagttgtatcatctaccaacggtatatgaataatattaatattagagttaggtaatgtatatttatccatcgtcaaatttaaaacatatttgaacttaacttcagatgatggtgcatccatagcatttttataatttcccaaatacacattattggttacccttgtcattatagtgggagatttggctttgtgcatatctccagttgaacgtagtagtaagtatttatacaaacttttcttatccatttataacgtacaaatggataaaactactttatcggtaaacgcgtgtaatttagaatacgttagagaaaaggctatagtaggcgtacaagcagccaaaacatcaacacttatattctttgttattatattggcaattagtgcgctattactctggtttcagacgtctgataatccagtctttaatgaattaacgagatatatgcgaattaaaaatacggttaacgattggaaatcattaacggatagcaaaacaaaattagaaagtgatagaggtagacttctagccgctggtaaggatgatatatttgaattcaaatgtgtggatttcggcgcctattttatagctatgcgattggataagaaaacatatctgccgcaagctattaggcgaggtactggagacgcgtggatggttaaaaaggcggcaaaggtcgatccatctgctcaacaattttgtcagtatttgataaaacacaagtctaataatgttattacttgtggtaatgagatgttaaatgaattaggttatagcggttattttatgtcaccgcattggtgttccgattttagtaatatggaatagtgttagataaatgcggtaacgaatgttcctgtaaggaaccataacagcttagatttaacgttaaagatgagcataaacataataaacaaaattacaatcaaacttataacattaatatcaaacaatccaaaaaatgaaatcagtggagtagtaaacgcgtacataactcctggataacgtttagcagctgccgttcctattctagaccaaaaattcggtttcatgttttcgaaacggtattctgcaacaagtcgaggatcgtgttctacatatttggcggcattatccagtatctgcctattgatcttcatttcgttttcgattctggctatttcaaaataaaatcccgatgatagacctccagactttataatttcatctacgatgttcagcgccgtagtaactctaataatataggctgataagctaacatcataccctcctgtatatgtgaatatggcatgatttttgtccattacaagctcggttttaactttattgcctgtaataatttctctcatctgtaggatatctatttttttgtcatgcattgccttcaagacgggacgaagaaacgtaatatcctcaataacgttatcgttttctacaataactacatattctacctttttattttctaactcggtaaaaaaattagaatcccatagggctaaatgtctagcgatatttcttttcgtttcctctgtacacatagtgttacaaaaccctgaaaagaagtgagtatacttgtcatcatttctaatgtttcctccagtccactgtataaacgcataatccttgtaatgatctggatcatccttgactaccacaacatttcttttttctggcataacttcgttgtcctttacatcatcgaacttctgatcattaatatgctcatgaacattaggaaatgtttctgatggaggtctatcaataactggcacaacaataacaggagttttcaccgccgccatttagttattgaaattaatcatatacaactctttaatacgagttatattttcgtctatccattgtttcacattgacatatttcgacaaaaagatataaaatgcgtattccaatgcttctctgtttaatgaattactaaaatatacaaacacgtcactgtctggcaataaatgatatcttagaatattgtaacaatttattttgtattgcacatgttcgtgatctatgagttcttcttcgaatggcataggatctccgaatctgaaaacgtataaataggagttagaataataatatttgagagtattggtaatatataaactctttagcggtataattagtttttttctctcaatttctatttttagatgtgatggaaaaatgactaattttgtagcattagtatcatgaactctaatcaaaatcttaatatcttcgtcacacgttagctctttgaagtttttaagagatgcatcagttggttctacagatggagtaggtgcaacaattttttgttctacacatgtatgtactggagccattgttttaactataatggtgcttgtatcgaaaaactttaatgcagatagcggaagctcttcgccgcgactttctacgtcgtaattgggttctaacgccgatctctgaatggatactagttttctaagttctaatgtgattctctgaaaatgtaaatccaattcctccggcattatagatgtgtatacatcggtaaataaaactatagtatccaacgatcccttctcgcaaattctagtcttaaccaaaaaatcgtatataaccacggagatggcgtatttaagagtggattcttctaccgttttgttcttggatgtcatataggaaactataaagtccgcactactgttaagaatgattactaacgcaactatatagtttaaattaagcattttggaaacataaaataactctgtagacgatacttgactttcgaataagtttgcagacaaacgaagaaagaacagacctctcttaatttcagaagaaaactttttttcgtattcctgacgtctagagtttatatcaataagaaagttaagaattagtcggttaatgttgtatttcattacccaagtttgagatttcataatattatcaaaagacatgataatattaaagataaagcgctgactatgaacgaaatagctatatggttcgctcaagaatatagtcttgttaaacgtggaaacgataactgtatttttaatcacgtcagcggcatctaaattaaatataggtatatttattccacacactctacaatatgccacaccatcttcataataaataaattcgttagcaaaattattaattttagtgaaatagttagcgtcaactttcatagcttccttcaatctaatttgatgctcacacggtgcgaattccactctaacatcccttttccatgcctcaggttcatcgatctctataatatctagttttttgcgtttcacaaacacaggctcgtctctcgcgatgagatctgtatagtaactatgtaaatgataactagatagaaagatgtagctatatagatgacgatcctttaagagaggtataataactttaccccaatcagatagactgttgttatggtcttcggaaaaagaatttttataaatttttccagtattttccaaatatacgtacttaacatctaaaaaatccttaatgataataggaatggataatccgtctattttataaagaaatacatatcgcacattatacttttttttggaaatgggaataccgatgtgtctacataaatatgcaaagtctaaatattttttagagaatcttagttggtccaaattcttttccaagtacggtaatagatttttcatattgaacggtatcttcttaatctctggttctagttccgcattaaatgatgaaactaagtcactatttttataactaacgattacatcacctctaacatcatcatttaccagaatactgatcttcttttgtcgtaaatacatgtctaatgtgttaaaaaaaagatcatacaagttatacgtcatttcatctgtggtattcttgtcattgaaggataaactcgtactaatctcttctttaacagcctgttcaaatttatatcctatatacgaaaaaatagcaaccagtgtttgatcatccgcgtcaatattctgttctatcgtagtgtataacaatcgtatatcttcttctgtgatagtcgatacgttataaaggttgataacgaaaatatttttatttcgtgaaataaagtcatcgtaggattttggacttatattcgcgtctagtagatatgcttttatttttggaatgatctcaattagaatagtctctttagagtccatttaaagttacaaacaactaggaaattggtttatgatgtataatttttttagtttttatagattctttattctatacttaaaaaatgaaaataaatacaaaggttcttgagggttgtgttaaattgaaagcgagaaataatcataaattatttcattatcgcgatatccgttaagtttgtatcgtaatggcgtggtcaattacgaataaagcggatactagtagcttcacaaagatggctgaaatcagagctcatctaaaaaatagcgctgaaaataaagataaaaacgaggatattttcccggaagatgtaataattccatctactaagcccaaaaccaaacgagccactactcctcgtaaaccagcggctactaaaagatcaaccaaaaaggaggaagtggaagaagaagtagttatagaggaatatcatcaaacaactgaaaaaaattctccatctcctggagtcagcgacattgtagaaagcgtggccgctgtagagctcgatgatagcgacggggatgatgaacctatggtacaagttgaagctggtaaagtaaatcatagtgctagaagcgatctctctgacctaaaggtggctaccgacaatatcgttaaagatcttaagaaaattattactagaatctctgcagtatcgacggttctagaggatgttcaagcagctggtatctctagacaatttacttctatgactaaagctattacaacactatctgatctagtcaccgagggaaaatctaaagttgttcgtaaaaaagttaaaacttgtaagaagtaaatgcgtgcacttttttataaagatggtaaactctttaccgataataattttttaaatcctgtatcagacgataatccagcgtatgaggttttgcaacatgttaaaattcctactcatttaacagatgtagtagtatatgaacaaacgtgggaggaggcgttaactagattaatttttgtgggaagtgattcaaaaggacgtagacaatacttttacggaaaaatgcatgtacagaatcgcaacgctaaaagagatcgtatttttgttagagtatataacgttatgaaacgaattaattgttttataaacaaaaatataaagaaatcgtccacagattccaattatcagttggcggtttttatgttaatggaaactatgttttttattagatttggtaaaatgaaatatcttaaggagaatgaaacagtagggttattaacactaaaaaataaacacatagaaataagtcccgatgaaatagttatcaagtttgtaggaaaggacaaagtttcacatgaatttgttgttcataagtctaatagactatataaaccgctattgaaactgacggatgattctagtcccgaagaatttctgttcaacaaactaagtgaacgaaaggtatacgaatgtatcaaacagtttggtattagaatcaaggatctccgaacgtatggagtcaattatacgtttttatataatttttggacaaatgtaaagtccatatctcctcttccgtcaccaaaaaagttaatagcattaactatcaaacaaactgctgaagtggtaggtcatactccatcaatttcaaaaagagcttatatggcaacgactattttagaaatggtaaaggataaaaattttttagatgtagtatctaaaactacgttcgatgaattcctatctatagtcgtagatcacgttaaatcatctacggatggatgatatagatctttacacaaataattacaagaccgataaatggaaatggataagcgtatgaaatctctcgcaatgacagctttcttcggagagctaagcacattagatattatggcattgataatgtctatatttaaacgccatccaaacaataccattttttcagtggataaggatggtcagtttatgattgatttcgaatacgataattataaggcttctcaatatttggatctgaccctcactccgatatctggagatgaatgcaagactcacgcatcgagtatagccgaacaattggcgtgtgcggatattattaaagaggatattagcgaatatatcaaaactactccccgtcttaaacgatttataaaaaaataccgcaatagatcagatactcgtatcagtcgagatacagaaaagcttaaaatagctctagctaaaggcatagattacgaatatataaaagacgcttgttaataagtaaatgaaaaaaaactagtcgtttataataaaacacgatatggatgccaacgtagtatcattttctactattgcgacgtatatagacgctttagcgaagaatgcttcggaattagaacagaggtctaccgcatacgaaataaataatgaattggaactagtatttattaagccgccattgattactttgacaaatgtagtgaatatctctacgattcaggaatcgtttattcgatttaccgttactaataaggaaggtgttaaaattagaactaagattccattatctaaggtacatggtctagatgtaaaaaatgtacagttagtagatgctatagataacatagtttgggaaaagaaatcattagtgacggaaaatcgtcttcacaaagaatgcttgttgagactatcgacagaggaacgtcatatatttttggattacaagaaatatggatcctctatccgactagaattagtcaatcttattcaagcaaaaacaaaaaactttacgatagactttaagctaaaatattttctaggatccggtgcccagtctaaaagttctttgttgcacgctattaatcatccaaagtcaaggcctaatacatctctggaaatagaattcacacctagagacaatgaaacagttccatatgatgaactaataaaggaattgacgactctctcgcgtcatatatttatggcttctccagagaatgtaattctttctccgcctattaacgcgcctataaaaacctttatgttgcctaaacaagatatagtaggtttggatctggaaaatctatatgccgtaactaagactgacggcattcctataactatcagagttacatcaaacgggttgtattgttattttacacatcttggttatattattagatatcctgttaagagaataatagattccgaagtagtagtctttggtgaggcagttaaggataagaactggaccgtatatctcattaagctaatagagcctgtgaatgcaatcaatgatagactagaagaaagtaagtatgttgaatctaaactagtggatatttgtgatcggatagtattcaagtcaaagaaatacgaaggtccgtttactacaactagtgaagtcgtcgatatgttatctacatatttaccaaagcaaccagaaggtgttattctgttctattcaaagggacctaaatctaacattgattttaaaattaaaaaggaaaatactatagaccaaactgcaaatgtagtatttaggtacatgtccagtgaaccaattatctttggagaatcgtctatctttgtagagtataagaaatttagcaacgataaaggctttcctaaagaatatggttctggtaagattgtgttatataacggcgttaattatctaaataatatctattgtttggaatatattaatacacataatgaagtgggtattaagtccgtggttgtacctattaagtttatagcagaattcttagttaatggagaaatacttaaacctagaattgataaaaccatgaaatatattaactcagaagattattatggaaatcaacataatatcatagtcgaacatttaagagatcaaagcatcaaaataggagatatctttaacgaggataaactatcggatgtgggacatcaatacgccaataatgataaatttagattaaatccagaagttagttattttacgaataaacgaactagaggaccgttgggaattttatcaaactacgtcaagactcttcttatttctatgtattgttccaaaacatttttagacgattccaacaaacgaaaggtattggcgattgattttggaaacggtgctgacctggaaaaatacttttatggagagattgcgttattggtagcgacggatccggatgctgatgctatagctagaggaaatgaaagatacaacaaattaaactctggaattaaaaccaagtactacaaatttgactacattcaggaaactattcgatccgatacatttgtctctagtgtcagagaagtattctattttggaaagtttaatatcatcgactggcagtttgctatccattattcttttcatccgagacattatgctaccgtcatgaataacttatccgaactaactgcttctggaggcaaggtattaatcactaccatggacggagacaaattatcaaaattaacagataaaaagacttttataattcataagaatttacctagtagcgaaaactatatgtctgtagaaaaaatagctgatgatagaatagtggtatataatccatcaacaatgtctactccaatgactgaatacattatcaaaaagaacgatatagtcagagtgtttaacgaatacggatttgttcttgtagataacgttgatttcgctacaattatagaacgaagtaaaaagtttattaatggcgcatctacaatggaagatagaccgtctacaaaaaactttttcgaactaaatagaggagccattaaatgtgaaggtttagatgtcgaagacttacttagttactatgttgtttatgtcttttctaagcggtaaataataatatggtatgggttctgatctcccagttctaaatgcattaaataattccaatagagcgatttttgttcctataggaccttccaactgtggatactctgtattgttaatagatatattaatacttttgtcgggtaacagaggttctacgtcttctaaaaataaaagttttataacatctggcctgttcataaataaaaacttggcgattctatatatactcttattatcaaatctagccattgtcttatagatgtgagctactgtaggtgtaccatttgattttctttctaatactatatatttctctcgaagaagttcttgcacatcatctgggaataaaatactactgttgagtaaatcagttattttttttatatcgatattgatggacatttttatagttaaggataataagtatcccaaagtcgataacgacgataacgaagtatttatacttttaggaaatcacaatgactttatcagattaaaattaacaaaattaaaggagcatgtatttttttctgaatatattgtgactccagatacatatggatctttatgcgtcgaattaaatgggtctagttttcagcacggcggtagatatatagaggtggaggaatttatagatgctggaagacaagttagatggtgttctacatccaatcatatatctaaagatatacccgaagatatgcacactgataaatttgtcatttatgatatttatacgtttgattcgttcaagaataaacgattggtattcgtacaggtacctccgtcgttaggagatgatagtcatttgactaatccgttattgtcaccgtattatcgtaattcagtagccagacaaatggtcaatgatatgatttttaatcaagattcatttttaaaatatttattagaacatctgattagaagccactatagagtttctaaacatataacaatagttagatacaaggataccgaagaattaaatctaacgagaatatgttataatagagataagtttaaggcgtttgtattcgcttggtttaacggcgtttcggaaaatgaaaaggtactagatacgtataaaaaggtatctaatttgatataatgaattcagtgactgtatcacacgcgccatatactattacttatcacgatgattgggaaccagtaatgagtcaattggtagagttttataacgaagtagccagttggctgctacgagacgagacgtcgcctattcctgataagttctttatacagttgaaacaaccgcttagaaataaacgagtatgtgtgtgtggtatagatccgtatccgaaagatggaactggtgtaccgttcgaatcaccaaattttacaaaaaaatcaattaaggagatagcttcatctatatctagattaaccggagtaattgattataaaggttataaccttaatataatagacggggttataccctggaattattacttaagttgtaaattaggagaaacaaaaagtcacgcgatttactgggataagatttccaagttactgctgcagcatataactaaacacgttagtgttctttattgtttgggtaaaacagatttctcgaatatacgggccaagttagaatccccggtaactaccatagtcggatatcatccagcggctagagaccgccaattcgagaaagatagatcatttgaaattatcaacgttttactggaattagacaacaaggcacctataaattgggctcaagggtttatttattaatgctttagtgaaattttaacttgtgttctaaatggatgcggctattagaggtaatgatgttatctttgttcttaagactataggtgtcccgtcagcgtgcagacaaaatgaagatccaagatttgtagaagcatttaaatgcgacgagttagaaagatatattgagaataatccagaatgtacactattcgaaagtcttagggatgaggaagcatactctatagtcagaattttcatggatgtagatttagacgcgtgtctagacgaaatagattatttaacggccattcaagattttattatcgaggtgtcaaactgtgtagctagattcgcgtttacagaatgcggcgccattcatgaaaatgtaataaaatccatgagatctaatttttcattgactaagtctacaaatagagataaaacaagttttcatattatctttttagatacgtataccactatggatacattgatagctatgaaacgaacactattagaattaagtagatcatctgaaaatccactaaccagatcgatagacactgccgtatataggagaaaaacaactcttcgggttgtaggtactaggaaaaatccaaattgcgacactattcatgtaatgcaaccaccgcatgataatatagaagattacctattcacttacgtggatatgaacaacaatagttattacttttctctacaacaacgattggaggatttagttcctgataagttatgggaaccagggtttatttcattcgaagacgctataaaaagagtttcaaaaatattcattaattctataataaactttaatgatctcgatgaaaataattttacaacggtaccactggtcatagattacgtaacaccttgtgcattatgtaaaaaacgatcgcataaacatccgcatcaactatcgttggaaaatggtgctattagaatttacaaaactggtaatccacatagttgtaaagttaaaattgttccgttggatggtaataaactgtttaatattgcacaaagaattttagacactaactctgttttattaaccgaacgaggagaccatatagtttggattaataattcatggaaatttaacagcgaagaacccttgataacaaaactaattttgtcaataagacatcaactacctaaggaatattcaagcgaattactctgtccaagaaaacgaaagactgtagaagctaacatacgagacatgttagtagattcagtggagaccgatacctatccggataaacttccgtttaaaaatggtgtattggacctggtagacggaatgttttactctggagatgatgctaaaaaatatacgtgtactgtatcaaccggatttaaatttgacgatacaaagttcgtcgaagacagtccagaaatggaagagttaatgaatatcattaacgatatccaaccattaacggatgaaaataagaaaaatagagagctatatgaaaaaacattatctagttgtttatgcggtgctaccaaaggatgtttaacattcttttttggagaaactgcaactggaaagtcgacaaccaaacgtttgttaaagtctgctatcggtgacctgtttgttgagacgggtcaaacaattttaacagatgtattggataaaggacctaatccatttatcgctaacatgcatttgaaaagatctgtattctgtagcgaactacctgattttgcctgtagtggatcaaagaaaattagatctgacaatattaaaaagttgacagaaccttgtgtcattggaagaccgtgtttctccaataaaattaataatagaaaccatgcgacaatcattatcgatactaattacaaacctgtttttgataggatagataacgcattaatgagaagaattgccgtcgtgcgattcagaacacacttttctcaaccttctggtagagaggctgctgaaaataatgacgcgtacgataaagtcaaactattagacgaggggttagatggtaaaatacaaaataatatatatagatttgcatttctatacttgttggtgaaatggtacaaaaaatatcatgttcctattatgaaactatatcctacacccgaagagattcctgactttgcattctatctcaaaataggtactctgttggtatctagctctgtaaagcatattccattaatgacggacctctccaaaaagggatatatattgtacgataatgtggtcactcttccgttgactactttccaacagaaaatatccaagtattttaattctagactatttggacacgatatagagagcttcatcaatagacataagaaatttgccaatgttagtgatgaatatctgcaatatatattcatagaggatatttcatctccgtaaatatatgctcatatatttatagaagatatcacatatctaaatgaataccggaatcatagatttatttgataatcatgttgatagtataccaactatattacctcatcagttagctactctagattatctagttagaactatcatagatgagaacagaagcgtgttattgttccatattatgggatcaggtaaaacaataatcgctttgttgttcgccttggtagcttccagatttaaaaaggtttacattctagtgccgaacatcaacatcttaaaaattttcaattataatatgggtgtagctatgaacttgtttaatgacgaattcatagctgagaatatctttattcattccacaacaagtttttattctcttaattataacgataacgtcattaattataacggattatctcgctacaataactctatttttatcgttgatgaggcacataatatctttgggaataatactggagaacttatgaccgtgataaaaaataaaaacaagattccttttttactattgtctggatctcccattactaacacacctaatactctgggtcatattatagatttaatgtccgaagagacgatagattttggtgaaattattagtcgtggtaagaaagtaattcagacacttcttaacgaacgcggtgtgaatgtacttaaggatttgcttaaaggaagaatatcatattacgaaatgcctgataaagatctaccaacgataagatatcacggacgtaagtttctagatactagagtagtatattgtcacatgtctaaacttcaagagagagattatatgattactagacgacagctatgttatcatgaaatgtttgataaaaatatgtataacgtgtcaatggcagtattgggacaacttaatctgatgaataatttagatactttatttcaggaacaggataaggaattgtacccaaatctgaaaataaataatggcgtgttatacggagaagaattggtaacgttaaacattagttccaaatttaaatactttattaatcggatacagacactcaacggaaaacattttatatacttttctaattctacatatggcggattggtaattaaatatatcatgctcagtaatggatattctgaatataatggttctcagggaactaatccacatatgataaacggcaaaccaaaaacatttgctatcgttactagtaaaatgaaatcgtctttagaggatctattagatgtgtataattctcctgaaaacgatgatggtagtcaattgatgtttttgttttcatcaaacattatgtccgaatcctatactctaaaagaggtaaggcatatttggtttatgactatcccagatactttttctcaatacaaccaaattcttggacgatctattagaaaattctcttacgccgatatttctgaaccagttaatgtatatcttttagccgccgtatattccgatttcaatgacgaagtgacgtcattaaacgattacacacaggatgaattaattaatgttttaccatttgacatcaaaaagctgttgtatctaaaatttaagacgaaagaaacgaatagaatatactctattcttcaagagatgtctgaaacgtattctcttccaccacatccatcaattgtaaaagttttattgggagaattggtcagacaatttttttataataattctcgtattaagtataacgataccaagttacttaaaatggttacatcagttataaaaaataaagaagacgctaggaattacatagatgatattgtaaacggtcacttctttgtatcgaataaagtatttgataaatctcttttatacaaatacgaaaacgatattattacagtaccgtttagactttcctacgaaccatttgtttggggagttaactttcgtaaagaatataacgtggtatcttctccataaaactgatgagatatataaagaaataaatgtcgagctttgttaccaatggatacctttccgttacattggaaccacacgagctgacgttagacataaaaactaatattaggaatgccgtatataagacgtatctccatagagaaattagtggtaaaatggccaagaaaatagaaattcgtgaagacgtggaattacctctcggcgaaatagttaataattctgtagttataaacgttccgtgtgtaataacctacgcgtattatcacgttggggatatagtcagaggaacattaaacatcgaagatgaatcaaatgtaactattcaatgtggagatttaatctgtaaactaagtagagattcgggtactgtatcatttagcgattcaaagtactgcttttttcgaaatggtaatgcgtatgacaatggcagcgaagtcactgccgttctaatggaggctcaacaaggtatcgaatctagttttgtttttctcgcgaatatcgtcgactcataaaaaagagaatagcggtaagtataaacacgaatactatggcaataattgcgaatgttttattctcttcgatatatttttgataatatgaaaaacatgtctctctcaaatcggacaaccatctcataaaatagttctcgcgcgctggagaggtagttgccgctcgtataatctctccagaataatatacttgcgtgtcgtcgttcaatttatacggatttctatagttctctgttatataatgcggtttgccctcatgattagacgacgacaatagtgttctaaatttagatagttgatcagaatgaatgtttattggcgttggaaaaattatccatacagcgtctgcagagtggttgatagttgttcctagatatgtaaaataatccaacttactaggcagcaaattgtctagataaaatactgaatcaaacggtgcagacgtattggcggatctaatggaatccaattgattaactatcttttgaaaatatacatttttatgatccaatacttgtaagaatatagaaataatgataagtccatcatcgtgtttttttgcctcttcataagaactatattttttcttattccaatgaacaagattaatctctccagagtatttgtacacatctatcaagtgattggatccataatcgtcttcctttccccaatatatatgtagtgatgataacacatattcattggggagaaaccctccacttatatatcctcctttaaaattaatccttactagttttccagtgttctggatagtggttggtttcgactcattataatgtatgtctaacggcttcaatcgcgcgttagaaattgcttttttagtttctatattaataggagatagttgttgcggcatagtaaaaatgaaatgataactgtttaaaaatagctcttagtatgggaattacaatggatgaggaagtgatatttgaaactcctagagaattaatatctattaaacgaataaaagatattccaagatcaaaagacacgcatgtgtttgctgcgtgtataacaagtgacggatatccgttaataggagctagaagaacttcattcgcgttccaggcgatattatctcaacaaaattcagattctatctttagagtatccactaaactattacggtttatgtactacaatgaactaagagaaatctttagacggttgagaaaaggttctatcaacaatatcgatcctcactttgaagagttaatattattgggtggtaaactagataaaaaggaatctattaaagattgtttaagaagagaattaaaagaggaaagtgatgaacgtataacagtaaaagaatttggaaatgtaattctaaaacttacaacacgggataaattatttaataaagtatatataagttattgcatggcgtgttttattaatcaatcgttggaggatttatcgcatactagtatttacaatgtagaaattagaaagattaaatcattaaatgattgtattaacgacgataaatacgaatatctgtcttatatttataatatgctagttaatagtaaatgaacttttacagatctagtataattagtcagattattaagtataatagacgactagctaagtctattatttgcgaggatgactctcaaattattacactcacggcattcgttaaccaatgcctatggtgtcataaacgagtatccgtgtccgctattttattaactactgataacaaaatattagtatgtaacagacgagatagttttctctattctgaaataattagaactagaaacatgtttagaaagaaacgattatttctgaattattccaattatttgaacaaacaggaaagaagtatactatcgtcatttttttctctagatccagctactactgataatgatagaatagacgctatttatccgggtggcatacccaaaaggggtgagaatgttccagagtgtttatccagggaaattaaagaagaagttaatatagacaattcttttgtattcatagacactcggttttttattcatggcatcatagaagataccattattaataaattttttgaggtaatcttctttgtcggaagaatatctctaacgagtgatcaaatcattgatacatttaaaagtaatcatgaaatcaaggatctaatatttttagatccgaattcaggtaatggactccaatacgaaattgcaaaatatgctctagatactgcaaaacttaaatgttacggccatagaggatgttattatgaatcattaaaaaaattaactgaggatgattgattaaaaaatataaattaatttaccatcgtgtatttttataacgggattgtccggcatatcatgtagatagttaccgtctacatcgtatactcgaccatctacgcctttaaatcctctatttattgacattaatctattagaattggaataccaaatattagtaccctcaattagtttattggtaatattttttttagacgatagatcgatggctcttgaaaccaaggttttccaaccggactcattgtcgatcggtgagaagtctttttcattagcatgaatccattctaatgatgtatgtttaaacactctaaacaattggacaaattcttttgatttgctttgaatgatttcaaataggtcttcgtctacagtaggcataccattagataatctagccattataaagtgcacgtttacatatctacgttctggaggagtaagaacgtgactattgagacgaatggctcttcctactatctgacgaagagacgcctcgttccatgtcatatctaaaatgaagatatcattaattgagaaaaaactaataccctcgcctccactagaagagaatacgcatgttttaatgcattctccgttagtgtttgattcttggttaaactcagccaccgccttgattctagtatcttttgttctagatgagaactctatattagagataccaaagactttgaaatatagtaataagatttctattcctgactgattaacaaatggttcaaagactagacatttaccatgggatgctaatattcccaaacatacatctataaatttgacgcttttctcttttaattcagtaaatagagagatatcagccgcactagcatcccctttcaatagttctccctttttaaaggtatctaatgcggatttagaaaactctctatctcttaatgaatttttaaaatcattatatagtgttgctatctcttgcgcgtattcgcccggatcacgattttgtctttcaggaaagctatcgaacgtaaacgtagtagccatacgtctcagaattctaaatgatgatatacctgtttttatttcagcgagtttagccttttgataaatttcttcttgctttttcgacatattaacgtatcgcattaatactgttttcttagcgaatgatgcagacccttctacgtcatcaaaaatagaaaactcgttattaactatatacgaacatagtcctcctagtttggagactaattctttttcatcgactagacgtttattctcaaatagcgattggtgttgtaaggatcctggtcgtagtaagttaaccaacatggtgaattcttgcacactattgacgataggtgtagccgataaacaaatcatcttatggttttttaacgcaatggtcttagataaaaaattatatactgaacgagtaggacggatcttaccatcttctttgattaatgatttagaaatgaagttatgacattcatcaataatgacgcatattctactcttggaattaatagttttgatattagtaaaaaatttatttctaaaattttgatcatcgtaattaataaaaatacaatccttcgttatctctggagcgtatctgagtatagtgttcatccaaggatcttctatcaaagcctttttcaccaataagataatagcccaattcgtataaatatccttaagatgtttgagaatatatacagtagtcattgttttaccgacacccgtttcatggaacaataaaagagaatgcatactgtctaatcctaagaaaactcttgctacaaaatgttgataatccttgaggcgtactacgtccgaccccatcatttcaacgggcatattagtagttctgcgtaaggcataatcgatataggccgcgtgtgatttactcatttatgagtgataagtaataactatgttttaaaaatcacagcagtagtttaactagtcttctctgatgtttgttttcgatactttttgaatcagaagtcatactagaataaagcaacgagtgaacgtaatagagagcttcgtatactctattcgaaaactctaagaacttattaatgaattccgtatccactggattgtttaaaatactaaattgaacactgttcacatccttccaagaagaagacttagtgacggacttaacatgagacataaataaatccaaattttttttacaaacatcactagccaccataatggcgctatctttcaaccagctatcgcttacgcattttagcagtctaacatttttaaagagactacaatatattctcatagtatcgattacacctctaccgaataaagttggaagtttaataatacaatatttttcgtttacaaaatcaaataatggtcgaaacacgtcgaaggttaacatcttataatcgctaatgtatagattgttttcagtgagatgattattagatttaatagcatctcgttcacgtttgaacagtttattgcgtgcgctgaggtcggcaactacggcgtccgctttagtactcctcccataatactttacgctattaatctttaaaatttcatagactttatctagatcgctttctggtaacatgatatcatgtgtaaaaagttttaacatgtcggtcggcattctatttagatcattaactctagaaatctgaagaaagtaattagctccgtattccagactaggtaatgggcttttacctagagacagattaagttctggcaatgtttcataaaatggaagaaggacatgcgttccctcccggatattttttacaatttcatccatttacaactctatagtttgttttcattattattagttattatctcccataatcttggtaatacttaccccttgatcgtaagataccttatacaggtcattacatacaactaccaattgtttttgtacataatagattggatggttgacatccatggtggaataaactactcgaacagatagtttatctttccccctagatacattagccgtaatagttgtcggcctaaagaatatctttggtgtaaagttaaaagttagggttcttgttccattattgctttttgtcagtagttcattataaattctcgagatgggtccgttctctgaatatagaacatcatttccaaatctaacttctagtctagaaataatatcggtcttattcttaaaatctattcccttgatgaagggatcgttaatgaacaaatccttggcctttgattcggctgatctattatctccgttatagacgttacgttgactagtccaaagacttacaggaatagatgtatcgatgatgttgatactatgtgatatgtgagcaaagattgttctcttagtggcatcactatatgttccagtaatggcggaaaactttttagaaatgttatatataaaagaattttttcgtgttccaaacattagcagattagtatgaagataaacactcatattatcaggaacattatcaatttttacatacacatcagcatcttgaatagaaacgataccatcttctggaacctctacgatctcggcagactccggataaccagtcggtgggccatcgctaacaataactagatcatccaacaatctactcacatatgcatctatataatctttttcatcttgtgagtaccctggatacgaaataaatttattatccgtatttccataataaggtttagtataaacagagagagatgttgccgcatgaacttcagttacagtcgccgttggttggtttatttgacctattactctcctaggtttctctataaacgatggtttaatttgtacattcttaaccatatatccaataaagctcaattcaggaacataaacaaattctttgttgaacgtttcaaagtcgaacgaagagtcacgaataacgatatcggatactggattgaaggttaccgttacggtaatttttgaatcggatagtttaagactgctgaatgtatcttccacatcaaacggagttttaatataaacgtatactgtagatggttctttaatagtgtcattaggagttaggccaatagaaatatcattaagttcactagaatatccagagtgtttcaaagcaattgtattattgatacaattattatataattcttcgccctcaatttcccaaataacaccgttacacgaagagatagatacgtgattaatacatttatatccaacatatggtacgtaactgaatcttcccatacctttaacttctggaagttccaaactcagaaccaaatgattaagcgcagtaatatactgatccctaatttcgaagctagcgatagcctgattgtctggaccatcgtttgtcataactccggatagagaaatatattgcggcatatacaaagttggaatttgactatcgactgcgaagacattagaccgtttaatagagtcatccccaccgatcaaagaattaatgatagtattattcattttctatttaaaatggaaaaagcttacaataaactccgtagagaaatatctataatttgtgagttttccttaaagtaacagcttccgtaaacgccgtctttatctcttagtaggtttattgtatttatgaccttttccttatcttcatagaatactaaaggcaacaaagaaatttttggttcttctctaagagctacgtgagacttaaccatagaagccaacgaatccctacatattttagaacagaaataccctacttcaccacccttgtatgtctcaatactaataggtctaaaaaccaaatcttgattacaaaaccaacacttatcaattacactatttgtcttaatagacacatctgccatagatttataatactttggtagtatacaagcgagtgcttcttctttagcgggcttaaagactgctttaggtgctgaaataaccacatctggaaggcttactcgcttagccatttaattacggaactatttttttatacttctaatgagcaagtagaaaacctctcatctacaaaaacgtactcgtgtccataatcctctaccatagttacacgttttttagatctcatatgtgctaaaaagttttcccatactaattggttactattatttttcgtataatttttaacagtttgaggttttagatttttagttacagaagtgatatcgaatattttatccaaaaagaatgaataattaattgtcttagaaggagtgttttcttggcaaaagaataccaagtgcttaaatatttctactacttcattaatcttttctgtactcagattcagtttctcatcttttacttgattgattatttcaaagactaacttataatcctttttatttattctctcgttagccttaagaaaactagatacaaaatttgcatctacatcatccgtggatatttgatttttttccatgatatccaagagttccgagataatttctccagaacattgatgagacaataatctccgcaatacatttctcaaatgaataagtttattagacacgtggaagtttgactttttttgtacctttgtacatttttgaaataccgactcgcaaaaaatacaatattcatatccttgttcagatactataccgttatgtctacaaccgctacataatcgtagattcatgttaacactctacgtatctcgtcgtccaatattttatataaaaacattttatttctagacgttgccagaaaatcctgtaatatttttagttttttgggctgtgaataaagtatcgccctaatattgttaccgtcttccgccaatatagtagttaaattatccgcacatgcagaagaacaccgcttaggcggattcagtacaatgttatatttttcgtaccaactcatttaaatatcataatctaaaatagttctgtaatatgtctagcgctaatatattgatcataatcctgtgcataaattaagatacaacaatgtctcgaaatcatcgacatggcttcttccatagttagaagatcgtcgtcaaagttagcaacgtgattcatcaacatttgctgttttgaggcagcaaatactgaaccgtcgccattcaaccattcataaaaaccatcgtctgaatccattgataatttcttgtactggtttttgagagctcgcatcaatctagcatttctagctcccggattgaaaacagaaagaggatcgtacatccagggtccattttctgtaaatagaatcgtataatgtcccttcaagaagatatcagacgatccacaatcaaagaattggtctccgagtttgtaacaaactgcggactttaacctatacatgataccgtttagcataatttctggtgatacgtcaatcggagtatcatctattagagatctaaagccggtgtaacattctccaccaaacatattcttattctgacgtcgttctacataaaacatcattgctccattaacgataacaggggaatgaacagcactacccatcacattagttcccaatggatcaatgtgtgtaactccagaacatcttccatagcctatgttaggaggagcgaacaccactcttccactattgccatcgaatgccatagaataaatatccttggaattgatagaaatcggactgtcggatgttgtgatcatcttcataggattaacaactatgtatggtgccgcctgaagtttcatatcgtaactgatgccgtttataggtctagccacagaaaccaacgtaggtctaaatccaactatagacaaaatagaagccaatatctgttcctcatctgtcataacttgagagcatccagtatgaataatcttcattagatggggatctaccgcatcatcatcgttacaataaaaaattcccattctaatgttcataattgcttttctaatcatggtatgcatgtttgctctctgaatctctgtggaaattagatctgatacacctgtaatcactatcggattatcctccgtaagacgattaaccaacaacatataattataagactttacttttctaaattcataaagttgctggattaggctataggtgtctccatgtacatacgcgttctcgagcgcaggaagtttaataccgaatagtgccatcagaataggatgaatatagtaattagtttctggttttctataaataaaagacaaatcttgtgaactagacatatcggtaaaatgcatggattggaatcgtgtagtcgacagaagaatatgatgattagatggagagtatattttatctaactctttgagttggtcaccgattctaggactagctcgagaatgaataagtactaaaggatgagtacatttcacagaaacactagcattgttcaatgtgctctttacatgggtaaggagttgaaatagctcgtttctatttgttctgacaatatttagtttattcataatgttaagcatatcctgaatagtaaagttagatgtgtcatacttgttagtagttagatatttagcaattgcattcccatcatttctcaatctcgtactccaatcatgcgtggatgctacttcgtcgatggaaaccatacaatcctttttgataggctgttgagattgatcatttcctgcacgtttaggtttggtacgttgatttctagcccctgcggatataaagtcatcgtctacaatttgggacaatgaattgcatacactacaagacaaagatttatcagaagtgtgaatatgatcttcatctaccaaagaaagagtttgattagtataactagattttagtcctgcgttagatgttaaaaaaacatcgctattgaccacggcttccattatttatattcgtagtttttactcgaaagcgtgattttaatatccaatcttattacttttggaatcgttcaaaacctttgactagttgtagaatttgatctattgccctacgcgtatactcccttgcatcatatacgttcgtcaccagatcgtttgtttcggcctgaagttggtgcatatctctttcaacattcgacatgagatccttaagggccatatcgtctagattttgttgagatgctgctcctggatttggattttgttgtgctgttgtacatactgtaccaccagtaggtgtaggagtacatacagtggccacaataggaggttgagaaagtgtaaccgttggagtagtacaagaaatacttccatccgattgttgtgtacatgtagttgttggtaacgtctgagaaggttgggtagatggcggcgtcgtcgttttttgatctttattaaatttagagataatatcctgaacagcattgctcggcgtcaacgctggaaggagtgaactcgccggcgcatcagtatcttcagacagccaatcaaaaagattagacatatcagatgatgtattagtttgttgtcgtggttttggtgtaggagcagtactactaggtagaagaataggagccgatgtagctgttggaaccggctgtggagttatatgaatagttggttgtagcggttggataggctgtctgctggcggccatcatattatctctagctagttgttctcgcaactgtctttgataatacgactcttgagactttagtcctatttcaatcgcttcatcctttttcgtatccggatccttttcttcagaataatagattgacgactttggtgtagaggattctgccagcctctgtgagaacttgttaaagaagtccatttaaggctttaaaattgaattgcgattataagattaaatggcagacacagacgatattatcgactatgaatccgatgatctcaccgaatacgaggatgatgaagaagaggaagaagatggagagtcactagaaactagtgatatagatcccaaatcttcttataagattgtagaatcagcatccactcatatagaagatgcgcattccaatcttaaacatatagggaatcatatatctgctcttaaacgacgctatactagacgtataagtctatttgaaatagcgggtataatagcagaaagctataacttgcttcaacgaggaagattacctctagtttcagaattttctgacgaaacgatgaagcaaaatatgctacatgtaattatacaagagatagaggagggttcttgtcctatagtcatcgaaaagaacggagaattgttgtcggtaaacgattttgacaaagatggtctaaaattccatctagactatattatcaaaatttggaaacttcaaaaacgatattagaatttatacgaatatcgttctctaaatgtcacaatcaagtctcgcatgttcagcaatttattgtcgtactttatatcgtgttcattaacgatatcttgcaaaatagtaatgattctatcttccttcgatagatattcttcagagattattgtcttatattctttcttgttatcagatatgaatttgataagactttgaacattattgatacccgtctgtttaattttttctacagatattttagttttggcagattctatcgtatctgtcaatagacatccaacatcgacattcgacgtcaattgtctataaatcaacgtataaattttagaaataacattagcgaattgttgtgcgttgatgtcgttattctgaaacagtatgattttaggtagcattttcttaacaaagagaacgtatttattgttactcagttgaacagatgatatatccagattactaacgcatctgattccgtataccaaactttcagaagaaatggtatacaattgtttgtattcattcaatgtctctttttcagaaattagtttagagtcgaatactgcaataattttcaagagatagttttcatcagataagattttatttagtgtagatatgataaaactattgttttgttggagaacttgatacgccgcgttctctgtagtcgacgctctcaaatgggaaacaatctccattatttttttggaatcggatactatatcttcggtatcttgacgcagtctagtatacatagagttaagagagattagagtttgtacattaagcaacatgtctctaaatgtggctacaaacttttcctttttcacatcatctagtttattatataccgatttcacaacggcaccagatttaaggaaccagaatgaaaaactctgataactacaatatttcatcatagttacgattttatcatcttctatagttggtgtaatagcgcatacctttttctccaagactggaaccaacgtcataaaaatgtttaaatcaaaatccatatcaacatctgatgcgctaagaccagtctcgcgttcaagattatctttactaatggtgacgaactcatcgtataaaactctaagtttgtccattatttatttacagatttagttgtttaatttatttgtgctcttccagagttgggatagtatttttctaacgtcggtattatattattaggatctacgttcatatgtatcataatattaatcatccacgttttgataaatctatctttagcttctgaaataacgtatttaaacaaaggagaaaaatatttagctacggcatcagacgcaataacattttttgtaaatgtaacgtatttagacgacagatcttcgttaaaaagttttccatctatgtagaatccatcggttgttaacaccattcccgcgtcagattgaataggagtttgaatagtttgttttggaaatagatccttcaataacttatagttgggtgggaaaaaatcgattttatcactagactctttcttttttactatcattacctcatgaactatttcttgaatgagtatatgtattttctttcctatatcggacgcgttcattggaaaatataccatgtcgttaactataagaatatttttatcctcgtttacaaactgaataatatcagatgtagttcgtaaacgaactatatcatcaccagcacaacatctaactatatgatatccactagtttcctttagccgtttattatcttgttccatattagcagtcattccatcatttaagaaggcgtcaaaaataatagggagaaatgacattttggattctgttacaactttaccaaaattaaggatatacggacttactatctttttctcaacgtcaatttgatgaacacacgatgaaaatgtgcttctatgagattgatcatgtagaaaacaacaagggatacaatatttccgcatatcatgaaatatattaagaaatcccaccttattatatttccccaaaggatccatgcacgtaaacattatgccgttatcattaataaagacttctttctcatcggatctgtaaaagttgttactgatttttttcattccaggatctagataattaataatgatgggttttctattcttattctttgtattttggcatatcctagaccagtaaacagtttccactttggtaaaatcagcagacttttgaacgctattaaacatggcattaatggcaataactaaaaatgtaaaatatttttctatgttaggaatatggtttttcactttaatagatatatggtttttggccaaaatgatagatatttttttatccgaggatagtaaaatattattagtcgccgtctctataaaaatgaagctagtctcgatatccaattttattctagaattgataggagtcgccaaatgtaccttatacgttatatctcccttgatgcgttccatttgtgtatctatatcggacacaagatctgtaaatagttttacgttattaatcatcacggtatcgccgtcgctagataacgctaatgtaccatccaagtcccaaatggagagatttaactgttcatcgtttagaataaaatgattaccggtcatattaataaagtgttcatcgtatctagataacaacgacttataattaatgtccaagtcttgaactcgctgaatgatcttttttaacccagttagttttagattggtacgaaatatattgttaaactttgattctacagtaatgtccaaatctagttgtggaaatacttccatcaacattgtttcaaacttgataatattattatctacatcttcgtacgatccaaattccggaatagatgtatcgcacgctctggccacccagataaccaaaaagtcacacgctccaggatatacattgtataaaaagctatcgttttttagtagggtttttttctgcgtgtatacgaagggattaaaaatagtattatcaacgtaactatattccaaattattcttatgagaatagataataatatcgtccttaatatctaacaaatttcctaaatatccctttaattgagtcattcgaagcgtcaatagaatatgtctcttaactatttccggctgttgtatatttaaatgacttcgtaaaaaataatatatgggcgacttctcatctatgtaatcatatggagtgagatatagggctcgttctacctcctgccccttacccacctgtaataccaattgcggacttactatatatcgcatatttatatcgtggggtaaagtgaaaatctactaccgatgatgtaagtcttacaatgttcgaaccagtaccagatcttaatttggaggcctccgtagaactaggggaggtaaatatagatcaaacaacacctatgataaaggagaatagcggttttatatcccgcagtagacgtctattcgcccatagatctaaggatgatgagagaaaactagcactacgattctttttacaaagactttattttttagatcatagagagattcattatttgttcagatgcgttgacgctgtaaaagacgtcactattaccaaaaaaaataacattatcgtggcgccttatatagcacttttaactatcgcatcaaaaggatgcaaacttacagaaacaatgattgaagcattctttccagaactatataatgaacatagtaagaaatttaaattcaactctcaagtatccatcatccaagaaaaactcggataccagtttggaaactatcacgtttatgattttgaaccgtattactctacagtagctctggctattcgagatgaacattcatctggcatttttaatatccgtcaagagagttatctggtaagttcattatctgaaataacatatagattttatctaattaatctaaaatctgatcttgttcaatggagtgctagtacgggcgctgtaattaatcaaatggtaaatactgtattgattacagtgtatgaaaagttacaactggtcatagaaaatgattcacaatttacatgttcattggctgtggaatcaaaacttccaataaaattacttaaagatagaaatgaattatttacaaaattcattaacgagttaaaaaagaccagttcattcaagataagcaaacgcgataaggatacgctactaaaatattttacttaggactggagttagaatttatagacgactcatttcgtttatcattgttactattattactattactatcattattagtgttggcattattagtattcttcttgtcatcttgttcagaaatatacagcaatgctatacctaatactaaatacattatcatgctcgcaatggctctaacaacaacgaaccaaaatgaatttggtcgtagcttttgttcacaaaaatacataaagaaatgtctacataaatctatggcgccattggctacttgaaatagcgccagtcctcctacagattttaatatagctgtataacatgacatttattcatcatcaaaagagacagagtcaccatctgtcatatttagattttttttcatgtgttcaaagtatcctctactcatttcattataatagtttatcatacttagaattttaggacggatcaatgagtaagacttgactagatcgtcagtagtaatttgtgcatcgtctattctgcatccgcttcgtcgaataatgtatagcatcgctttgagattctccatagctatcaagtctttatacaatgacatggaaatatctgtgaatactttatacttctccaacatcgatgccttaacatcatcgcctactttagcattgaaaatacgttctattgtgtagatggatgtagcaagatttttaaacaacaatgccatcttacacgatgattgcctcaagtctccaatcgtttgtttagaacgattagctacagagtccaatgcttggctgactagcatattattatctttagaaattgtattcttcaatgaggcgtttatcatatctgtgatttcgttagtcatattacagtctgactgggttgtaatgttatccaacatatcacctatggatacggtacacgtaccagcatttgtaataatcctatctaagatgttgtatggcattgcgcagaaaatatcttctcctgtaatatctccactctcgataaatctactcagattattcttaaatgccttattctctggagaaaagatatcagtgtccatcatttcattaatagtatacgcagaaaagataccacgagtatcaattctatccaagatacttatcggttccgagtcacagataatggtttcctctccttcgggagatcctgcatagaaatatctaggacaatagtttctatactgtctgtaactctgataatctctaaagtcactaactgataccatgaaattgagaagatcaaacgctgaagtaattaatttttctgcctcgtttttactacaactagttttcatcaatgtagtgacgatgtattgtttagttacttttggtctaatactgatgatagagatattattgcttcccataatggatcttctagtagtcaccttaaagcccattgatgcgaatagcagatagataaagtcttggtatgactcctttctaatatagtacggactacctttgtcacccaactttatacccacataagccataacaacctctttaatagccgtttcatgaggtttatcagccatgagcctgagtagttggaagaatctcatgaatcccgtctcagaaagtcctatatgcatgatagatttatctttcctgggaaactctcgtatagtcatagatgaaatactctttaaagtttctgaaataagattagtaacagtcttacctccgactactctaggtaacaaacaaactctaataggtgttttctctgcggagataatatcagaaaggatagagcaataagtagtattattgtgattataaagaccgaatacataacaggtagaatttataaacatcatgtcctgaaggtttttagacttgtattcctcgtaatccataccgtcccaaaacatggatttggtaactttgatagccgtagatctttgttccttcgccaacaggttaaagaaattaataaagaatttgttgtttctatttatgtccacaaattgcacgtttggaagcgccacggttacattcactgcagcattttgaggatcgcgagtatgaagtacgatgttattgtttactggtatatctggaaagaaatctaccagtctaggaataagagattgatatcgcatagaaatagtaaagtttataatctcatcatcgaagagcattttgttaccattgtaataaatatccactctgtcatatgtataaatgaagtactgttcaaacatgatgagatgtttatatgttggcatagtagtgagatcgacgtttggtaatggcaatgtattaagattaactccataatgtctagcagcatctgcgatgttataagcgtcgtcaaagcggggtcgatcttgtattgttatatattgtctaacacctataagattatcaaaatcttgtctgcttaatacaccgttaacaatttttgccttgaattcttttattggtgcattaataacatccttatagaggatgttaaacaaataagtgttatcaaagttaagatctggatatttcttttctgctagaacatccattgagtcggagccatctggtttaatataaccaccgataaatctagctctgtattctgtatccgtcaatctaatattaagaaggtgttgagtgaaaggtggaagatcgtaaaagctgtgagtattaatgataggattagtttccgaactaatgttaattggggtattaataatatctatatttccagcgttaagtgtaacattaaacagttttaattcacgtgacgtggtatcaattaaataattaatgcccaatttggatatagcagcctgaagctcatcttgtttagttacggatcctaatgagttattaagcaatatatcgaacggatgaacgaaggttgttttaagttggtcacatactttgtaatctagacatagatgcggaagaacggtagaaactatacgaaataaatattcagagtcctctaattgatcaagagtaactattgacttaataggcatcatttatttagtattaaatgacgaccgtaccagtgacggatatacaaaacgatttaattacagagttttcagaagataattatccatctaacaaaaattatgaaataactcttcgtcaaatgtctattctaactcacgttaacaacgtggtagatagagaacataatgccgccgtagtgtcatctccagaggaaatatcctcacaacttaatgaagatctatttccagatgatgattcaccggccactattatcgaacgagtacaacctcatactactattattgacgatactccacctcctacgtttcgtagagagttattaatatcggaacaacgtcaacaacgagaaaaaagatttaatattacagtatcgaaaaatgctgaagcaataatggaatctagatctatgataacttctatgccaacacaaacaccatccttgggagtagtttatgataaagataaaagaattcagatgttagaggatgaagtggttaatcttagaaatcaacgatctaatacaaaatcatctgataatttagataattttaccaaaatactatttggtaagactccgtacaaatcaacagaagttaataagcgtatagccatcgttaattatgcaaatttgaacgggtcccccttatcagtcgaggacttggatgtttgttcggaggatgaaatagatagaatctataaaacgattaaacaatatcacgaaagtagaaaacgaaaaattatcgtcactaacgtgattattattgtcataaacattatcgagcaggcattgctaaaactcggatttgaagaaatcaaaggactgagtaccgatatcacttcagaaattatcgatgtggagatcggagatgactgcgatgctgtagcatctaaactaggaatcggtaacagtccggttcttaatattgtattgtttatactcaagatattcgttaaacgaattaaaattatttaatttaatacattcccatatccagacaacaatcgtctggattaatctgttcctgtcgtctcataccggacgacatattaatctttttattagtgggcatctttttagatggtttctttttcccagcattaactgagtcgatacctagaagatcgtgattgatctctccgaccattccacgaacttctaattggccgtctctgacggtaccataaactattttaccagcattagtaacagcttggacaatctgaccatccatcgcattgtacgatgtagtagtaactgttgttctacgtctaggagcaccagaagtatttttggagcccttggatgttgatgtagaagaagacgaggattttgattttggtttacatgtaatacattttgaactctttgattttgtatcacatgcgccggcagtcacatctgtttgagaattaagattattgttgcctcctttgacggctgcatctccaccgatttgcgctagtagatttttaagctgtggtgtaatcttattaactgtttcgatataatcatcgtaactgcttctaacggctaaattttttttatccgccatttagaagctaaaaatatttttatttatgcagaagatttaactagattatacaatgaactaatatgatccttttccagattatttacaaacttggtattttttggttctggaggaggcgaatttaaattcggacttggattcggattttgtaagttcttgatcttattatacatcgagtataggatggcgacagtaactgctacacaaataccgatcaaaagaagaataccaatcatttattgacaataacttcactattgatcaagtatgcaatatatcatcttttcactaaataagtagtaataatgattcaacaatgtcgagatatatggacgataataatttagttcatggaaatatcgctatgattggtgtgaatgactccgctaactctgtggggtgcgcagtgctttccccacatagaataaattagcattccgactgtgataataataccaagtataaacgccataatactcaatactttccatgtacgagtgggactggtagacttactaaagtcaataaaggcgaagatacacgaaagaatcaaaagaatgattccagcgattagcacgccggaaaaataatttccaatcataagcatcatgtccatttaactaataaaaattttaaatcgccgaatgaacaaagtggaatataaaccatataaaaacaatagtttgtactgcaaaaataatatctatttttgttttcgaagatatggtaaaattaaatagtagtacacagcatgttataactaacagcagcaacggctcgtaattacttatcatttactagacgaaaaggtggtgggatattttcttgctcaaataatacgaatatatcacccatccattttatgcgatgtttatatactctaatctttaatagatctatagacgacgggtttaccaacaatatagattttatcgattcatctaatttaaacccttccttaaacgtgaatgatctattatctggcataacgatgaccctacctgatgaatcggacaatgtactgggccatgtagaataaattatcaacgaattatcgtctacgaacatttatatcatttgttttaattttaggacgcgaataaatggatataaaatagaaaataacagatattacaaccagtgttatggccgcgcccaaccaggtaggcagttttattttatcttttactacaggttctcctggatgtacgtcaccaacggcggacgtagttctagtacaattagacgtaagttccgcttgggaattttttaacgctaaagagttaacgttaatcgtgcacccaacgtatttacatctagttcgttgaacatcttgattataatataaccattttctatctctagattcgtcagtgcactcatgtaaccaacataccctaggtcctaaatatttatctccggaattagattttggataattcgcgcaccaacaatttctatttcctttatgatcgttacaaaagacgtataatgccgtatccccaaaagtaaaataatcaggacgaataattctaataaactcagaacaatatctcgcatccatatgtttggagcaaatatcggaataagtagacatagccggtttccgttttgcacgtaaccattctaaacaattggggtttccaggatcgtttctacaaaatccagtcatgaaatcgtcacaatgttctgtcttgtaattattattaaatatttttggacagtgtttggtatttgtcttagaacaacattttgccacgctatcactatcgcccaggagataatccttttttataaaatgacatcgttgcccggatgctatataatcagtagcgtgttttaaatccttaatatattcaggagttacctcgttctgataatagattaatgatccaggacgaaatttgaaagaactacatggttctccatgaattaatacatattgtttagcaaattcaggaactataaaactactacaatgatctatcgacataccatctatcaaacaaaacttgggtttaatttctcccggagatgtttcataatagtacgtataactttcttctgcaaacttaacagctctattatattcaggataattaaaacctaattccatatatttgtctcgtatatctgctattcctggtgctattttgattctattaagagtaacagctgcccccattcttaataatcgtcagtatttaaactgttaaatgttggtatatcaacatctaccttatttcccgcagtataaggtttgttgcaggtatactgttcaggaatggttacatttatacttcttctatagtcctgtctttcgatgttcatcacatatgcaaagaacagaataaacaaaataatgtaagaaataatattaaatatctgtgaattcgtaaatacattgattgccataataattacagcagctacaatacacacaatagacattcccacagtgttgccattacctccacgatacatttgagttactaagcaataggtaataactaagctagtaagaggcaatagaaaagatgagataaatatcatcaatatagagattagaggagggctatatagagccaagacgaacaaaatcaaaccgagtaacgttctaacatcattatttttgaagattcccaaataatcattcattcctccataatcgttttgcatcatacctccatctttaggcataaacgattgctgctgttcctctgtaaataaatctttatcaagcactccagcacccgcagagaagtcgtcaagcatattgtaatatcttaaataactcatttatatattaaaaaatgtcactattaaagatggagtataatctttatgccgaactaaaaaaaatgacttgtggtcaacccctaagtctttttaacgaagacggggatttcgtagaagttgaaccgggatcatcctttaagtttctgatacctaagggattttacgcctctccttccgtaaagacgagtctagtattcgagacattaacaacgaccgataataaaatcactagtatcaatccaacaaatgcgccaaagttatatcctcttcaacgcaaagtcgtatctgaagtagtttctaatatgaggaaaatgatcgaatcaaaacgtcctctatacatcactcttcacttggcgtgtggatttggtaagactattaccacgtgttatcttatggctacacacggtagaaaaaccgtcatttgcgtacccaataaaatgttaatacatcaatggaagacacaggtagaggcagtcggattggaacataagatatccatagatggagtaagtagtctattaaaggaactaaagactcaaagtccggatgtattaatagtagtcagtagacatctgacaaacgatgccttttgtaaatatatcaataagcattatgatttgttcatcttggatgaatcacatacgtataatctgatgaacaatacagcagttacaagatttttagcgtattatcctccgatgatgtgttattttttaactgctacacctagaccatctaaccgaatttattgtaacagtattattaatattgccaagttatccaatctaaaaaaaactatctatgcagtagatagtttttttgagccatattccacagataatattagacatatggtaaaacgactagatggaccatctaataaatatcatatatataccgagaagttattatctgtagacgagcctagaaatcaacttattcttgataccctggtagaagaattcaagtcaggaactattaatcgcattttagttattactaaactacgtgaacatatggtattattctacaaacgattattagattttttcggaccagaggttgtatttataggagacgcccaaaatagacgtactccagatatggtcaaatcaatcaaggaactaaatagatttatattcgtatccaccttattttattccggtactggtttagatattcctagtttggattcgttgttcatttgctcggcagtaatcaacaatatgcaaatagagcaattactagggagggtatgtcgagaaacagaactattagataggacggtatatgtatttcctaacacatccatcaaagaaataaagtacatgataggaaatttcatgcaacgaattattagtctgtctgtagataaactaggatttaaacaaaaaagttatcggaaacatcaagaatccgatcccacttctgcatgtacaacatcatccagagaagaacgtgtattaaatagaatatttaactcgcaaaatcgttaagaagtttaagcgacgatccgcatgctgcgcaggccagtgtattacccctcatagtattaatataatccaatgatacttttgtgatgtcggaaatcttaaccaatttagactgacaggcagaacacgtcatgcaatcatcatcgtcatcgataactgtagtcttgggcttctttttgcgactcttcattccggaacgcacattggtgctatccatttaggtagtaaaaaataagtcagaatatgccctataacacgatcgtgcaaaacctggtatatcgtctctatctttatcacaatatagtgtatcgacatttttattattattgacctcgtttatcttggaacatggaatgggaacatttttgttatcaacggccatctttgccttaattccagatgttgtaaaattataactaaacagtctatcatcgacacaaatgaaattcttgtttagacgtttgtagtttacgtatgcggctcgttcgcgtctcattttttcagatattgcaggtactataatattaaaaataagaatgaaataacataggattaaaaataaagttatcatgacttctagcgctgatttaactaacttaaaagaattacttagtctgtacaaaagtttgagattttcagattctgcggctatagaaaagtataattctttggtagaatggggaacatctacttactggaaaataggcgtgcaaaaggtagctaatgtcgagacgtcaatatctgattattatgatgaggtaaaaaataaaccgtttaatattgatccgggctattacattttcttaccggtatattttgggagcgtctttatttattcgaagggtaaaaatatggtagaacttggatctggaaactcttttcaaataccagatgatatgcgaagtgcgtgtaacaaagtattagacagcgataacggaatagactttctgagatttgttttgttaaacaatagatggataatggaagatgctatatcaaaatatcagtctccagttaatatatttaaactagctagtgagtacggattaaacatacccaaatatttagaaattgaaatagaggaagacacattatttgacgacgagttatactctattatagaacgctctttcgatgataaatttccaaaaatatccatatcgtatattaagttgggagaacttagacggcaagttgtagactttttcaaattctcattcatgtatattgagtccatcaaggtagatcgtataggagataatatttttattcctagcgttataacaaaatcaggaaaaaagatattagtaaaagatgtagaccatttaatacgatccaaggttagagaacatacatttgtaaaagtaaaaaagaaaaacacattttccattttatacgactatgatggaaacggaacagaaactagaggagaagtaataaaacgaattatagacactataggacgagactattatgttaacggaaagtatttctctaaggttggtagtgcaggcttaaagcaattgactaataaattagatattaatgagtgcgcaactgtcgatgagttagttgatgagattaataaatccggaactgtaaaacgaaaaataaaaaaccaatcagcatttgatttaagcagagaatgtttgggatatccagaagcggattttataacgttagttaataacatgcggttcaaaatagaaaattgtaaggttgtaaatttcaatattgaaaatactaattgtttaaataacccgagtattgaaactatatatggaaactttaaccagttcgtctcaatctttaatgtcgtcaccgatgtcaaaaaaagattattcgagtgaaataatatgcgcctttgatataggtgcaaaaaatcctgccagaactgttttagaagtcaaggataactccgttagggtattggatatatcaaaattagactggagttctgattgggaaaggcgcatagctaaagatttgtcacaatatgaatacactacagttcttctagaacgtcagcctagaaggtcgccgtatgttaaatttatctattttattaaaggctttttatatcatacatcggctgccaaagttatttgcgtctcgcctgtcatgtctggtaattcatatagagatcgaaaaaagagatcggtcgaagcatttcttgattggatggacacattcggattgcgagactccgttccggatagacgcaaattagacgatgtagcggatagtttcaatttggctatgagatacgtattagataaatggaatactaattatacaccttataataggtgtaaatctagaaattacataaaaaaaatgtaataacgttagtaacgccattatggataatctatttacctttctacatgaaatagaagatagatatgccagaactatttttaactttcatctaataagttgcgatgaaataggagatatatatggtcttatgaaagaacgcatttcctcagaggatatgtttgataatatagtgtataataaagatatacatcctgccattaagaaactagtgtattgcgacatccaacttactaaacacattattaatcagaatacgtatccggtatttaacgattcttcacaagtgaaatgttgtcattatttcgacataaactcagataatagcaatattagctctcgtacagtagagatatttgagagggaaaagtcatctcttgtatcatatattaaaactaccaataagaagagaaaggtcaattacggcgaaataaagaaaactgttcatggaggcactaatgcaaattacttttccggtaaaaagtctgacgagtatctgagtactacagttagatccaacattaatcaaccttggatcaaaaccatctctaagaggatgagagttgatatcattaatcactctatagtaacgcgtggaaaaagctctatattacaaactatagaaattatttttactaatagaacatgtgtgaaaatattcaaggattctactatgcacattattctatccaaggacaaggatgaaaaggggtgtatacacatgattgacaaattattctatgtctattataatttatttctgttgttcgaagatatcatccaaaacgagtactttaaagaagtagctaatgttgtaaaccacgtactcacggctacggcattagatgagaaattattcctaattaagaaaatggctgaacacgatgtttatggagttagcaatttcaaaatagggatgtttaacctgacatttattaagtcgttggatcataccgttttcccctctctgttagatgaggatagcaaaataaagttttttaaggggaaaaagctcaatattgtagcattacgatctctggaggattgtataaattacgtgactaaatccgagaatatgatagaaatgatgaaggaaagatcgactattttaaatagcatagatatagaaacggaatcggtagatcgtctaaaagaattgcttctaaaatgaaaaaaaacactaattcagaaatggatcaacgactagggtataagtttttggtgcctgatcctaaagccggagttttttatagaccgttacatttccaatatgtatcgtattctaattttatattgcatcgattgcatgaaatcttgaccgtcaagcggccactcttatcgtttaagaataatacagaacgaattatgatagaaattagcaatgttaaagtgactcctccagattactcacctataatcgcgagtattaaaggtaagagttatgacgcattagccacgttcactgtaaatatctttaaagaggtaatgaccaaagagggtatatccatcactaaaataagtagttatgagggaaaagattctcatttgataaaaattccgctactaataggatacgggaataaaaatccacttgatacagccaagtatcttgttcctaatgtcataggtggagtctttatcaataaacaatctgtcgaaaaagtaggaattaatctagtagaaaagattacaacatggccaaaatttagggttgttaagccaaactcattcactttctcgttttcctccgtatcccctcctaatgtattaccgacaagatatcgccattacaagatatctctggatatatcacaattggaagcgttgaatatatcatcgacaaagacatttataacggtcaatattgttttgctgtctcaatatttatctagagtgagtctagaattcattagacgtagtttatcatacgatatgcctccagaagttgtctatctagtaaacgcgataatagatagtgctaaacgaattactgaatctattactgactttaatattgatacatacattaatgacctggtggaagctgaacacattaaacaaaaatctcagttaacgatcaacgagttcaaatatgaaatgctgcataactttttacctcatatgaactatacacccgatcaactaaagggattttatatgatatctttactaagaaagtttctctactgtatcttccacacttctagatatccagatagagattcgatggtttgtcatcgcatcctaacgtacggcaaatattttgagacgttggcacatgatgaattagagaattacataggcaacatccgaaacgatatcatgaacaatcacaagaacagaggcacttacgcggtaaacattcatgtactaacaactcccggacttaatcacgcgttttctagcttattgagtggaaagttcaaaaagtcagacggtagttatcgaacacatcctcactattcatggatgcagaatatttctattcctaggagtgttggattttatccggatcaagtaaagatttcaaagatgttttctgtcagaaaataccatccaagtcaatatctttacttttgttcatcagacgttccggaaagaggtcctcaggtaggtttagtatctcaattgtctgtcttgagttccattacaaatatactaacgtctgagtatttggatttggaaaagaaaatttgtgagtatatcagatcatattataaagatgatataagttactttgaaacaggatttccaatcactatagaaaatgctctagtcgcatctcttaatccaaatatgatatgtgattttgtaactgactttagacgtagaaaacggatgggattcttcggtaacttggaggtaggtattactttagttagggatcacatgaatgaaattcgcattaatattggagcgggaagattagtcagaccattcttggttgtggataacggagagctcatgatggatgtgtgtccggagttagaaagcagattagacgacatgacattctctgacattcagaaagagtttccgcatgtcatcgaaatggtagatatagaacaatttacttttagtaacgtatgtgaatcggttcaaaaatttagaatgatgtcaaaggatgaaagaaagcaatacgatttatgtgactttcctgccgaatttagagatggatatgtagcatcttcattagtgggaatcaatcacaattctggacccagagctattcttggatgtgctcaagctaaacaagctatctcttgtctgagctcggatatacgaaataaaatagacaatggaattcatttgatgtatccagagaggccaatcgtgattagtaaggctttagaaacttcaaagattgcggctaattgcttcggccaacatgttactatagcattaatgtcgtacaaaggtatcaatcaagaggatggaattatcatcaaaaaacaatttattcagagaggcggtctcgatattgttacagccaagaaacatcaagtagaaattccattggaaaactttaataacaaagaaagagataggtctaacgcctattcaaaattagaaagtaatggattagttagactgaatgctttcttggaatccggagacgctatggcacgaaatatctcatcaagaactcttgaagatgattttgctagagataatcagattagcttcgatgtttccgagaaatataccgatatgtacaaatctcgcgttgaacgagtacaagtagaacttactgacaaagttaaggtacgagtattaaccatgaaagaaagaagacccattctaggagacaaatttaccactagaacgagtcaaaagggaacagtcgcgtatgtcgcggatgaaacggaacttccatacgacgaaaatggtatcacaccagatgtcattattaattctacatccatcttctctagaaaaactatatctatgttgatagaagttattttaacagccgcatattctgctaagccgtacaacaataagggagaaaaccgacctgtctgttttcctagtagtaacgaaacatccatcgatacatatatgcaattcgctaaacaatgttatgagcattcaaatccgaaattgtccgatgaagaattatcggataaaatcttttgtgaaaagattctctatgatcctgaaacggataagccttatgcatccaaagtattttttggaccaatttattacttgcgtctgaggcatttaactcaggacaaggcaaccgttagatgtagaggtaaaaagacgaagctcattagacaggcgaatgagggacgaaaacgtggaggaggtatcaagttcggagaaatggagagagactgtttaatagcgcatggtgcagccaatactattacagaagttttgaaagattcggaagaagattatcaagatgtgtatgtttgtgaaaattgtggagacatagcagcacaaatcaagggtattaatacatgtcttagatgttcaaaacttaatctctctcctctcttaacaaaaattgataccacgcacgtatctaaagtatttcttactcaaatgaacgccagaggcgtaaaagtcaaattagatttcgaacgaaggcctccttcgttttataaaccattagataaagttgatctcaagccgtcttttctggtgtaatattctagtttggtagtagatacatatcaatatcatcaaattcgagatccgaattataaaatgggcgtggattgttaactatagaatcggacgtctgatattcgaaaatctgtggagtttcaggttttggtggaggtgtaactgctacttgggatactgaagtctgatattcagaaagctgtggatgttctggttcggcatccaccgatggtgtcacatcactaatcggttcggtaacgtctgtggatggaggtgctacttctacagaacctgtagcctcagttgtcaacggagatacatttttaatgcgagaaaatgtataatttggtaatggtttcttatgtggatctgaagaagaggtaagatatctactagaaagataccgatcacgttctagttctcttttgtagaacttaactttttctttctccgcatctagttgatattccaacctcttcacgttactacgttcagattccaattcacgttcgcatgggttacctccgcagtttttacgagcgatttcacgttcagccttcatgcgtctctccctctctctatcgagtttatcagagcagtctttctgaaggcgatcgaactccataaatttctccaacgctttgattgtttccatagatttccgaagttcagcttttaggactgtgattctttttctttcgaattcacagctggatgtacaaccgtttccattaccgccatctctaagtttcttttctagatcggcaacatttcatccccatgccttttacattcctcgagtctactgtcgtcgaaatatcgttccagctccttttcgacatcaataactttagcacgttgtctctcaagctctcttttgtagttatctgattccctggcacgtttaagatcttcatgcaattgagtcagctcttaacttcctctcttgcttcttcgtcatagtacgcgcaatcactgtgagatccattgttaccacgtctacactcggcgagctcgcgtttaagagattcaatttcccgtttgtattggtccatgtttccattgctaccaccattagatttacaggctgctagttgtcgttcgagatcagaaatacgggttttcttggaattgatttcgtcgatgtacttggcatcgaaacacttattaagttctttttccaattctacgattttatttctttcgcgagtcaattccctcctgtagtaactatctgttttgtcagattcacgctctctacgtagactttcttgcaagttactaatttgttccctagcacgtccgagtttagttttatatgctgaatagagttctgattcatcctttgagcagatctctagcgatcgtttaagattcctaattctagtctttagcctatttacctcctcagaagatgttccgttaccgttgcgtttacactcgttaagctgtctatcaagatccatgattctatctctaagacgttgcatctctctttccatatcagcattgctttcattattacgtctgcagtcactcaactgtctttcaatatctgagattctatctctaagacgtcgcatctctctctgtttcggcattggtttcattattacgtttacagtcgttcaactgtctttcaagatctgatattctagattggagtctgctaatctctgtagcattttcacggcattcactcagttgtctttcaagatctgaaattttagattggagtctgctaatctctgtaagatttcctcctccgctctcgatgcagtcggtcaacttattctctagttctctaatacgcgaacgcagtgcatcaacttcttgcgtgtcttcctggttgcgtgtacattcatcgagatctctaacgcgtcgtcgttcttcctcaagttctctgcgtactacagaaagcgtgtccctatcttgttgatatttagcaatttctgattctagagtactgattttgcttacgtagttactaatagttgtcttggccttatcaagatcctccttgtatttgtcgcattccttgatatccctacgaagtctggacagttcccattcgacattacgacgtttatcgatttcagctcggagatcgtcatcgcgttgttttagccacatacgactgagttcaagttctcgttgacaagatccatctacttttccattcctaatagtatccagttccttttctagttctgaacgcatttctcgttccctatcaagcgattctctcaattctcggatagtcttcttatcaatttctaataaatctgaaccatcatctgtcccattttgaatatccctgtgttctttgatctcttttgtaagtcggtcgattctttcggttttataaacagaatccctttccaaagtcctaatcttactgagtttatcactaagttctgcattcaattcggtgagttttctcttggcttcttccaactctgttttaaactctccactatttccgcattcttcctcgcatttatctaaccattcaattagtttattaataactagttggtaatcagcgattcctatagccgttcttgtaattgtgggaacataattaggatcttctaatggattgtatggcttgatagcatcatctttatcattattagggggatggacaaccttaattggttggtcctcatctcctccagtagcgtgtggttcttcaataccagtgttagtaataggcttaggcaaatgcttgtcgtacgcgggcacttcctcatccatcaagtatttataatcgggttctacttcagaatattcttttctaagagacgcgacttcgggagttagtagaagaactctgtttctgtatctatcaacgctggaatcaatactcaagttaaggatagcgaatacctcatcgtcatcatccgtatcttctgaaacaccatcatatgacatttcatgaagtctaacgtattgataaatagaatcagatttagtattaaacagatccttaacctttttagtaaacgcatatgtatattttagatctccagatttcataatatgatcacatgccttaaatgtcagtgcttccatgatataatctggaacactaatgggtgacgaaaaagatacagcaccatatgctacgttgataaataaatctgaaccactaagtagataatgattaatgttaagaaagaggaaatattcagtgtataggtatgtcttggcgtcatatcttgtactaaacacgctaaacagtttgttaatgtgatcaatttccaatagattaattagagcagcgggaataccaacaaacatattaccacatccgtattttctatgaatatcacatatcatgttaaaaaatcttgatagaagagcgaatatctcgtctgacttaatgagtcgtagttcagcagcaacataagtcataactgtaaatagaacatactttcctgtagtgttgattctagactccacatcaacaccattattaaaaatagttttatatacatctttaatctgctctccgttaatcgtcgaacgttctagtatacggaaacactttgatttcttatctgtagttaatgacttagtgatatcacgaagaatattacgaattacatttcttgtttttcttgagagacctgattcagaactcaactcatcgttccatagtttttctacctcagtggcgaaatctttggagtgcttggtacatttttcaataaggttcgtgacctccatttattataaaaaatttattcaaaacttaactacaatcgggtaattataagatcgtagatctcccatgtggcggaatactaccatctatcgcatgtggatggacagtaggtaatggccatgggaacagtaatgtttgcatatttatctttcttgctagtattactgcatattgtcccaatgtttcgatgtgatgttctaacctatcaactgccgctgtatcacaacaatagtgtccgatgaaattaagattatgatccaatgtgtttaatatatgattatcaagtcttatacgatccgcgtcttttttgacaggatcaggttcttctacaggaagaagtttcggcctcttatgatattcatgtctgggaaacggtggtctagggtgaggctccggtatcggagtgggttttggattataatcatcatcgtctatgacatcatcttcgacttcgatatttattttgctatcttgatgatgtcctgtatcagttgcattttcagcactcgactgaatattagcgcattcattgtctattattaccatatttctaaacccaaaatgtatgtgttgaacatcagtactatcgttgatgagtcttatagcatgaattcgcttatcgttatcgggtttatcttctgtcaccttagcaattccttttttattaaactctacataatcatatccatttctattgtttgttctaatataaacgagtatagcatcattgctaaatttttcaatagtatcaaaaacagaatatcctaaaccatataatatatattcaggaacactcaaactaaatgtccaggattctcctaaatacgtaaactttaatagtgcgaaatcattcaaaaatctaccacttatagatagatagtacataaatgcgtatagtagtctacctatctctttattatgaaaaccggcattacgatcatatatgtcgtgatatacctgtgatccgtttacgttaaaccataaatacatgggtgatcctataaacatgaatttatttctaattctcagagctatagttaattgaccgtgtaatatttgcttacatgcatacttgatacgcttattaataagatttttatcattgctcgttatttcagaatcgtatatataaggagtaccatcgtgattcttaccagatattatacaaaatactatatataaaatatattgacccacgttagtaatcatataaatgtttaacgttttaaattttgtattcaatgatccattatcatacgctatcatggtcttgtaatattcattctttaaaatataatattgtgttagccattgcattggagctcctaatggagattttctattctcatccattttaggataggctttcataaagtccctaataacttcgtgaataatgtttctatgttttctactgatgcatgtatttgcttcgatttttttatcccatgtttcatctatcatagatttaaacgcagtaatgctcgcaacattaacatcttgaaccgttggtacaattccgttccataaatttataatgttcgccatttatataactcattttttgaatatacttttaattaacaaaagagttaagttactcatatggacgccgtccagtctgaacatcaatctttttagccagagatatcatagccgctcttagagtttcagcgtgattttccaacctaaatagaacttcatcgttgcgtttacaacacttttctatttgttcaaactttgttgttacattagtaatctttttttccaaattagttagccgttgtttgagagtttcctcattgtcgtcttcatcggctttaacaattgcttcgcgtttagcctctggctttttagcagcctttgtagaaaaaaattcagttgctggaattgcaagatcgtcatctccggggaaaagagttccgtccatttaaagtacagattttagaaactgacactctgcgttatttatatttggtacaacacatggattataaatattgatgttaataacatcagaaaatgtaaagtctatacattgttgcatcgtgttaaattttctaatggatctagtattattgggtccaacttctgcctgaaatccaaatatggaagcggatacaaaaccgtttcctggataaaccacacatctccacttttgctttacatcagaaattgtgtcgttgacatcttgaactctcctatctaatgccggtgttccacctatagattttgaatattcgaatgctgcatgagtagcattaaattccttaatattgccataattttcatatattgagtaaccctggataaaaagtaaacacaccgcagccgtcgctaccacaataaaaaaaattgatagagagttcatttataatctattagaagctgacaaaatttttttacacgcatcagacaatgctttaataaatagttcaacatctacttttgtcatatcgaaccgatggtatgattctaacctagaattacatccgaaaaagttgactatgttcatagtcattaagtcattaacaaacaacattccagactctggattataagacgatactgtttcgtcacaattacctaccttaatcatgtgattatgaatattggctattagagcaccttctaagaaatctataatatctttgaaacacgatttaaaatcaaaccacgaatatacttctacgaagaaagttagtttacccataggagaaataactataaatggagatctaaatacaaaatccggatctatgatagttttaacattattatattctctattaaatacctccacatctaaaaatgttaattttgaaactatgtcttcgtttattaccgtacctgaactaaacgctataagctctattgtttgagaactctttaaacgatattcttgaaatacatgtaacaaagtttcctttaactcggtcggtttatctaccatagttacagaatttgtatccttatctataatataataatcaaaatcgtataaagttatataattatcgcgttcagattgtgatcttttcaaatagactaaaaaccccatttctctagtaagtatcttatgtatatgtttgtaaaatatcttcatggtgggaatatgctctaccgcagttagccattcctcattgacagcggtagatgtattagacaaaactattccaatgtttaacaagggccattttacgagattattaaatccttgtttgataaatgtagccaatgagggttcgagttcaacgacgattgaattctcttcccgcggatgctgcatgatgaacgacgggatgttgttcgattgatttggaattctttttcgactttttgtttatattaaatattttaaaatttatagcggatagcaattcatgtaccacggataatgtagacgcgtattgcgcatcgatatctttattattagataaatttatcaataaatgtgagaagtttgcctcgttaaggtcttccatttaaatattatataaacatttgtgtttgtatcttattcgtcttttatggaatagttttttactagtaaagctgcaattacacactttgtccgtaaaacataaatataaacaccagcttttatcaatcgttccaaaaagtcgacggcggacatttttaacatggcatctattttaaatacacttaggtttttggaaaaaacatcattttataattgtaacgattcaataactaaagaaaagattaagattaaacataagggaatgtcatttgtattttataagccaaagcattctaccgttgttaaatacttgtctggaggaggtatatatcatgatgatttggttgtattggggaaggtaacaattaataatctaaagatgatgctattttacatggatttatcatatcatggagtgacaagtagtggagcaatttacaaattgggatcgtctatcgatagactttctctaaataggactattgttacaaaagttaataattatgatgatacattttttgacgacgatgattgatcgctattgcacaattttgtttttgtactttctaatatagtgtttaggttctttttcatatgagaatattgatttactaaaatatctatgtttaacttttgttctatgacgtccttatcggcggtatcggtacatatacgtaattcaccttcacaaaatacggagtcttcgataataatagccaatcgattattggatctagctgtctgtatcatattcaacatgtttaatatatcctttcgtttcccctttacaggcatcgatcgtagcatattttccgcgtctgatatggaaatgttaaaactacaaaaatgcgtaatgttagcccgtcctaatattggtacgtgtctataagtttggcatagtagaataatagacgtgtttaaatgccttccaaagtttaagaattctattagagtattgcattttgatagtttatcgcctacatcatcaaaaataagtaaaaagtgtgctgattttttatgattttgtgcgacagcaatacatttttctatgttacttttagttcgtatcagattatattctagagattcctgactactaacgaaattaatatgatttggccaaatgtatccatcataatctgggttataaacgggtgtaaacaagaatatatgtttatattttttaactagtgtagaaaacagagatagtaaatagatagtttttccagatccagatcctcctgttaaaaccattctaaacggcatttttaataaattttctcttgaaaattgtttttcttggaaacaattcataattatatttacagttactaaattaatttgataataaatcaaaatatggaaaactaaggttgttagtagggaggagaacaaagaaggcacatcgtgatataaataacatttattatcatgatgacaccagaaaacgacgaagagcagacatctgtgttctccgctactgtttacggagacaaaattcagggaaagaataaacgcaaacgcgtgattggtctatgtattagaatatctatggttatttcactactatctatgattaccatgtccgcgtttctcatagtgcgcctaaatcaatgcatgtctgctaacgaggctgctattactgacgccgctgttgccgttgctgctgcatcatctactcatagaaaggttgcgtctagcactacacaatatgatcacaaagaaagctgtaatggtttatattaccagggttcttgttatatattacattcagactaccagttattctcggatgctaaagcaaattgcactgcggaatcatcaacactacccaataaatccgatgtcttgactacctggctcattgattatgttgaggatacatggggatctgatggtaatccaattacaaaaactacatccgattatcaagattctgatgtatcacaagaagttagaaagtatttttgtgttaaaacaatgaactaatatttatttttgtacattaataaatgaaatcgcttaatagacaaactgtaagtaggtttaagaagttgtcggtgccggccgctataatgatgatactctcaaccattattagtggcataggaacatttctgcattacaaagaagaactgatgcctagtgcttgcgccaatggatggatacaatacgataaacattgttatttagatactaacattaaaatgtctacagataatgcggtttatcagtgtcgtaaattacgagctagattgcctagacctgatactagacatctgagagtattgtttagtattttttataaagattattgggtaagtttaaaaaagaccaatgataaatggttagatattaataatgataaagatatagatattagtaaattaacaaattttaaacaactaaacagtacgacggatgctgaagcgtgttatatatacaagtctggaaaactggttaaaacagtatgtaaaagtactcaatctgtactatgtgttaaaaaattctacaagtgacaacaaaaaatgaattaataataagtcgttaacgtacgccgccatggacgccgcgtttgttattactccaatgggtgtgttgactataacagatacattgtatgatgatctcgatatctcaatcatggactttataggaccatacattataggtaacataaaaactgtccaaatagatgtacgggatataaaatattccgacatgcaaaaatgctactttagctataagggtaaaatagttcctcaggattctaatgatttggctagattcaacatttatagcatttgtgccgcatacagatcaaaaaataccatcatcatagcatgcgactatgatatcatgttagatatagaagataaacatcagccattttatctattcccatctattgatgtttttaacgctacaatcatagaagcgtataacctgtatacagctggagattatcatctaatcatcaatccttcagataatctgaaaatgaaattgtcgtttaattcttcattctgcatatcagacggcaatggatggatcataattgatgggaaatgcaatagtaattttttatcataaaagttgtaaagtaaataataaaacaataaatattgaactagtagtacgtatattgagcaatcagaaatgatgctggtacctcttatcacggtgaccgtagttgcgggaacaatattagtatgttatatattatatatttgtaggaaaaagatacgtactgtctataatgacaataaaattatcatgacaaaattaaaaaagataaagagttctaattccagcaaatctagtaaatcaactgatagcgaatcagactgggaggatcactgtagtgctatggaacaaaacaatgacgtagataatatttctaggaatgagatattggacgatgatagcttcgctggtagtttaatatgggataacgaatccaatgttatggcgcctagcacagaacacatttacgatagtgttgctggaagcacgctgctaataaataatgatcgtaatgaacagactatttatcagaacactacagtagtaattaatgaaacggagactgttgaagtacttaatgaagataccaaacagaatcctaactattcatccaatcctttcgtaaattataataaaaccagtatttgtagcaagtcaaatccgtttattacagaacttaacaataaatttagtgagaataatccgtttagacgagcacatagcgatgattatcttaataagcaagaacaagatcatgaacacgatgatatagaatcatcggtcgtatcattggtgtgattagtttcctttttataaaattgaagtaatatttagtattattgctgccgtcacgttgtacaaatggagatattccctgtattcggcatttctaaaattagcaattttattgctaataatgactgtagatattatatagatacagaacatcaaaaaattatatctgatgagatcaatagacagatggatgaaacggtacttcttaccaacatcttaagcgtagaagttgtaaatgacaatgagatgtaccatcttattcctcatagattatcgacgattatactctgtattagttctgtcggaggatgtgttatctctatagataatgacatcaatggcaaaaatattctaacctttcccattgatcatgctgtaatcatatccccactgagtaaatgtgtcgtagttagcaagggtcctacaaccatattggttgttaaagcggatatacctagcaaacgattggtaacatcgtttacaaacgacatactatatgtaaacaatctgtcactgattaattatttgccgttgtctgtattcattattagacgagtcaccgactatttggatagacacatatgcgatcagatatttgctaataataagtggtattcccttataaccatcgacgataagcaatatcctattccatcaaactgtataggtatgtcctctgccaagtacataaattctagcatcgagcaagatactttaatccatgtttgtaacctcgagcatccgttcgactcagtatacaaaaaaatgcagtcgtacaattctctacctatcaaggaacaaatattgtacggtagaattgataatataaatatgagcattagtatttctgtggattaatagatttctagtatggggatcattaatcatctctaatctctaaatacctcataaaacgaaaaaaaagctattatcaaatactgtacggaatggattcattctcttctctttttatgaaactctgttgtatatctactgataaaactggaagcaaaaaatctgatagaaagaataagaataagatcaaggattatatggaacacgattattataaaataacaatagttcctggttcctcttccacgtctactagctcgtggtattatacacatgcctagtaatagtctctttgcgttgacggaaagcagactagaaataacaggctaaaatgttcagacaccataatagttcccaacccagataataacagagttccatcaacacattcctttaaactcaatcccaaacccaaaaccgttaaaatgtatccggccaattgatagtagataatgaggtgtacagcgcatgataatttacacagtaaccaaaatgaaaatactttagtaattataagaaatatagacggtaatgtcatcatcaacaatccgataatatgcctgagagtaaacattgacggataaaacaaaaatgctccgcataactctatcatggcaataacacaaccaaatacttgtaagattcctaaattagtagaaaatacaacgaatatcgatgtataagtgatctcgagaaataataagaataaagtaatgcccgtaaagataaacatcaacattgtttggtaatcattaaaccaattagtatgaagttgaactaatttcacagtagattttattccagtgttatcctcgcatgtataagtacctggtaagatatctttatattccataatcaatgagacatcactatctgataacgaatgaagtctagcactagtatgccatttacttaatattgtcgtcttggaagttttattataagttaaaatatcatggttatccaatttccatctaatatactttgtcggattatctatagtacacggaataatgatggtatcattacatgctgtatactctatggtctttgtagttgttataacaaccaacgtatagaggtatatcaacgatattctaactcttgacattttttatttatttaaaatgatacctttgttatttattttattctattttgctaacggtattgaatggcataagtttgaaacgagtgaagaaataatttctacttacttattagacgacgtattatacacgggtgttaatggggcggtatacacattttcaaataataaactaaacaaaactggtttaactaataataattatataacaacatctataaaagtagaggatgcggataaggatacattagtatgcggaaccaataacggaaatcccaaatgttggaaaatagacggttcagacgacccaaaacatagaggtagaggatacgctccttatcaaaatagcaaagtaacgataatcagtcacaacggatgtgtactatctgacataaacatatcaaaagaaggaattaaacgatggagaagatttgacggaccatgtggttatgatttattcacggcggataacgtaattccaaaagatggtttacgaggagcattcgtcgataaagacggtacttatgacaaagtttacattcttttcactgatactatcggctcaaagagaattgtcaaaattccgtatatagcacaaatgtgcctaaacgacgaaggtggtccatcatcattgtctagtcatagatggtcgacgtttctcaaagtcgaattagaatgtgatatcgacggaagaagttatagacaaattattcattctagaactataaaaacagataatgatacgatactatatgtattcttcgatagtccttattccaagtccgcattatgtacctattctatgaataccattaaacaatctttttctacgtcaaaattggaaggatatacaaagcaattgccgtctccagctcctggtatatgtttaccagctggaaaagttgttccacataccacgtttgaagtcatagaacaatataatgtactagatgatattataaagcctttatctaaccaacctatcttcgaaggaccgtctggtgttaaatggttcgatataaaggagaaggaaaatgaacatcgggaatatagaatatacttcataaaagaaaattctatatattcgttcgatacaaaatctaaacaaactcgtagctcgcaagtcgatgcgcgactattttcagtaatggtaactgcgaaaccgttatttatagcagatatagggataggagtaggaatgccacaaatgaaaaaaatacttaaaatgtaatcttaatcgagtacaccacacgacaatgaacaaacataagacagattatgctggttatgcttgctgcgtaatatgcggtctaattgtcggaattatttttacagcgacactattaaaagttgtagaacgtaaattagttcatacaccattaatagataaaacgataaaagatgcatatattagagaagattgtcctactgactggataagctataataataaatgtatccatttatctactgatcgaaaaacctgggaggaaggacgtaatgcatgcaaagctctaaattcaaattcggatctaattaagatagagactccaaacgagttaagttttttaagaagccttagacgaggctattgggtaggagaatccgaaatattaaaccagacaaccccatataattttatagctaagaatgccacgaagaatggaactaaaaaacggaaatatatttgtagcacaacgaatactcccaaactgcattcgtgttacactatataacaattacactacatttttatcataccactacttcggttagatgttttagaaaaaaataaatatcgccgtaccgttcttgtttttataaaaataacaattaacaattatcaaattttttctttaatattttacgtggttgaccattcttggtggtaaaataatctcttagtgttggaatggaatgctgtttaatgtttccacactcatcgtatattttgacgtatgtagtcacatcgtttacgcaatagtcagactgtagttctatcatgcttcctacatcagaaggaggaacagttttaaagtctcttggttttaatctattaccgttagttttcatgaaatcctttgttttatccacttcacattttaaataaatgtccactatacattcttttgttaattttactagatcgtcatgggtcatagaatttataggttccgtagtccatggatccaaactagcaaacttcgcgtatacggtatcgcgattagtgtatacaccaactgtatgaaaattaagaaaacagtttaataaatcaacagaaatatttaatcctccgtttgatacagatgcgccatatttatggatttcggattcacacgttgtttgtctgaggtgttcgtctagtgttgcttctacgtaaacttcgattcccatatattctttattgtcagaatcgcataccgatttatcatcatacactgtttgaaaactaaatggtatacacatcaaaataataaataataacgagtacattctgcaatattgttatcgtaattggaaaaatagtgttcgagtgagttggattatgtgagtattggattgtatattttattttatattttgtaataagaataaaatgctaatgtcaagtttattccaatagatgtcttattaaaaacatatataataaataacaatggctgaatggcataaaattatcgaggatatctcaaaaaataataagttcgaggatgccgccatcgttgattacaagactacaaagaatgttctagctgctattcctaacagaacatttgccaagattaatccgggtgaaattattcctctcatcactaatcgtaatattctaaaacctcttattggtcagaaatattgtattgtatatactaactctctaatggatgagaacacgtatgctatggagttgcttactgggtacgcccctgtatctccgatcgttatagcgagaactcataccgcacttatatttttgatgggtaagccaacaacatccagacgtgacgtgtatagaacgtgtagagatcacgctacccgtgtacgtgcaactggtaattaaaataaaaagtaatattcatatgtagtgtcaattttaaatgatgatgatgaaatggataatatccatattgacgatgtcaataatgccggtattggcatacagttcatcgatttttagatttcattcagaggatgtggaattatgttatgggcatttgtattttgataggatctataatgtagtaaatataaaatataatccgcatattccatatagatataattttattaatcgcacgttaaccgtagatgaactagacgataatgtcttttttacacatggttattttttaaaacacaaatatggttcacttaatcctagtttgattgtctcattatcaggaaacttaaaatataatgatatacaatgctcagtaaatgtatcgtgtctcattaaaaatttggcaacgagtacatctactatattaacatctaaacataagacttattctctacatcggtccacgtgtattactataataggatacgattctattatatggtataaagatataaatgacaagtataatgacatctatgattttactgcaatatgtatgctaatagcgtctacattgatagtgaccatatacgtgtttaaaaaaataaaaatgaactcttaattatgctatgctattagaaatggataaaatcaaaattacggttgattcaaaaattggtaatgttgttaccatatcgtataacttggaaaagataactattgatgtcacacctaaaaagaaaaaagaaaaggatgtattattagcgcaatcagttgctgtcgaagaggcaaaagatgtcaaggtagaagaaaaaaatattatcgatattgaagatgacgatgatatggatgtagaaagcgcgtaatacgatctataaaaataagtatataaatactttttatttactgtactcttactgtgtagtggtgataccctactcgattatttttttaaaaaaaaaatacttattctgattcttctagccatttccgtgttcgtttgaatgccacatcgacgtcaaagataggggagtagttgaaatctagttctgcattgttggtacgcacctcaaatgtagtgttggatatcttcaacgtatagttgttgagtagtgatggttttctaaatagaattctcttcatatcattcttgcacgcgtacatttttagcatccatcttggaatcctagatccttgttctattcccaatggtttcatcaatagaagattaaacatatcgtacgaacacgatggagagtaatcgtagcaaaagtaagcatttcctttaatcttagatcccggatactggatatattttgcagccaacacgtgcatccatgcagcatttcctacatatacccggctatgcaccgcgtcatcatcgactgtacgatacataatgttaccgtgttgcttacattgctcgtaaaagactttcatcaatttgtctccttctccgtaaattccagtgggtcttaggcaacaagtatacaattttgctccattcatgattacggaattattggctttcataaccagttgctcggccatacgtttactttttgcgtatacatgtcctggtgatatatcataaagggtatgctcatggccgatgaatggatcaccgtgtttattgggtcctattgcttccatgctactagtatagatcaaatacttgattcctaggtccacacaagctgccaaaatagtctgtgttccataatagtttactttcatgatttcattatcggtgtattttccaaatacatccactagagcagccgtatgaataatcagatttaccccatctagcgcttctctcaccttatcaaagtcgtttatatcacattgtatatagtttataaccttaactttcgaggttattggttgtggatcttctacaatatctatgactctgatttcttgaacatcatctgcactaattaacagttttactatatacctgcctagaaatccggcaccaccagtaaccgcgtacacggccattgctgccactcataatatcagactacttattctattttactaaataatggctgtttgtataatagaccacgataatatcagaggagttatttactttgaaccagtccatggaaaagataaagttttaggatcagttattggattaaaatccggaacgtatagtttgataattcatcgttacggagatattagtcaaggatgtgattccataggcagtccagaaatatttatcggtaacatctttgtaaacagatatggtgtagcatatgtttatttagatacagatgtaaatatatttacaattattggaaaggcgttatctatttcaaaaaatgatcagagattagcgtgtggagttattggtatttcttacataaatgaaaagataatacattttcttacaattaacgagaatggcgtttgatatatcagttaatgcgtctaaaacaataaatgcattagtttacttttctactcagcaaaataaattagtcatacgtaatgaagttaatgatacacactacactgtcgaatttgatagggacaaagtagttgacacgtttatttcatataatagacataatgacaccatagagataagaggggtgcttccagaggaaactaatattggttgcgcggttagtatgacttacttgtataataagtatagttttaaactgattttagcagaatatataagacacagaaatactatatccggcaatatttattcggcattgatgacactagatgatttggctattaaacagtatggagacattgatctattatttaatgagaaacttaaagtagactccgattcgggactatttgactttgtcaactttgtaaaggatatgatatgttgtgattctagaatagtagtagctctatctagtctagtatctaaacattgggaattgacaaataaaaaatataggtgtatggcattagccgaacatatatctgatagtattccaatatctgagctatctagactacgatacaatctatgtaagtatctacgcggacacactgagagcatagaggataaatttgattattttgaagacgatgattcgtctacatgttctgccgtaaccgacagggaaacggatgtataattttttttatagcgtgaaggatatgataaaaaatataattgttgtatttatcccattccaatcaccttatatgattctgtaacacaataaaggagtcttatagatgtatagaggtcagatactggtttgataaactgtttattccacataagtatgtttgactttatggttagacccgcatactttaacaaatcactgaaaattggagttaggtattgacctctcagaatcagttgccgttctggaacattaaatgtattttttatgatatactccaacgcatttatgtgggcatacaacaagtcattactaatggaatattccaagagttttagttgtctagtatttaacaagagaagagatttcaacagactgtttatgaactcgaatgccgcctcattgtcgcttatattgatgatgtcgaattctcccaatatcatcaccgatgagtagctcatcttgttatcgggatccaagttttctaaagatgtcattaaaccctcgatcatgaatggatttatcatcatcgtttttatgttggacatgagcttagtccgtttgtccacatctatagaagatgatttctgaattatttcatatatctctctctttaactccaggaacttgtcaggatggtctactttaatatgttctcgtctaagagatgaaaatctttggatggttgcacgcgacttttctctaaaggatgacgttgcccaagatcctctcttaaatgaatccatcttatccttggacaagatggacagtctattttccttagatggtttaatatttttgttacccatgatctataaaggtagacctaatcgtctcggatgaccatatatttattttcagttttattatacgcataaattgtaaaaaatatgttaggtttacgaaaatgtctcgtggggcattaatcgtttttgaaggattggacaaatctggaaaaacaacacaatgtatgaacatcatggaatcaataccttcaaacacaataaaataccttaactttcctcagagatccactgtcactggaaagatgatagatgactatctaactcgtaaaaaaacctataatgatcatatagttaatctattattttgtgcaaatagatgggagtttgcatcttttatacaagaacaactagaacagggaattactttaatagttgatagatacgcattttctggagtagcgtatgccgccgctaaaggcgcgtcaatgactctcagtaagagttatgaatctggattgcctaaacccgacttagttatattcttggaatctggtagcaaagaaattaatagaaacgtcggtgaggaaatttatgaagatgttacattccaacaaaaggtattacaagaatataaaaaaatgattgaagaaggagatattcattggcaaattatttcttctgaattcgaggaagatgtaaagaaggagttgattaagaatatagttatagaggctatacacacggttactggaccagtggggcaactgtggatgtaatagtgaaattacattttttataaatagatgttagtacagtgttataaatggatgaagcatattactctggcaacttggaatcagtactcggatacgtgtccgatatgcataccgaactcgcatcaatatctcaattagttattgccaagatagaaactatagataatgatatattaaacaaggacattgtaaattttatcatgtgtagatcaaacttggataatccatttatctctttcctagatactgtatatactattatagatcaagagaactatcagactgagttgattaattcattagacgacaatgaaattatcgattgtatagttaataagtttatgagcttttataaggataacctagaaaatatagtagatgctatcattactctaaaatatataatgaataatccagattttaaaactacgtatgccgaagtactcggttccagaatagccgatatagatattaaacaagtgatacgtaagaatatactacaattgtctaataatatccgcgaacgatatttgtgaaaatattaaaaaaaaatactttttttattaaatgacgtcttttcgtgaatttagaaaattatgctgtgctatatatcacgcatcaggatataaagaaaaatctaaattaattagagactttataacagatagggatgataaatatttgatcattaagctattgcttcccggattagacgatagaatttataacatgaacgataaacaaattataaaattatatagtataatatttaaacaatctcaggaagatatgctacaagatttaggatacggatatataggagacactattaggactttcttcaaagagaacacagaaatccgtccacgagataaaagcattttaactttagaagaagtggatagttttttaactacgttatcatccgtaactaaagaatcgcatcaaataaaattattgactgatgtagcatctgtttgtacatgtaatgatttaaaatgtgtagtcatgcttattgataaagatctaaaaattaaagcgggtcctcggtacgtacttaacgctattagtcctaatgcctatgatgtgtttagaaaatctaataacttgaaagagataatagaaaattcatctaaacaaaatctagactctatatctatttctgttatgactccaattaatcccatgttagcggaatcgtgtgattctgtcaataaggcgtttaaaaaatttccatcaggaatgtttgcggaagtcaaatacgatggtgaaagagtacaagttcataaaaataataacgagtttgccttctttagtagaaacatgaaaccagtactctctcataaagtggattatctcaaagaatacataccgaaagcatttaaaaaagctacgtctatcgtattggattctgaaattgttcttgtagacgaacataatgtaccgctcccgtttggaagtttaggtatacacaaaaagaaagaatataaaaactctaacatgtgtttgttcgtgtttgactgtttgtactttgatggattcgatatgacggacattccattgtacgaacgaagatcttttctcaaagatgttatggttgaaatacccaatagaatagtattctcagagttgacgaatattagtaacgagtctcagttaactgacgtattggatgatgcactaacgagaaaattagaaggattggtcttaaaagatattaatggagtatacgaaccgggaaagagaagatggttaaaaataaagcgagactatttgaacgagggttccatggcagattctgccgatttagtagtactaggtgcctactatggtaaaggagcaaagggtggtatcatggcagtctttctaatgggttgttacgacgatgaatccggtaaatggaagacggttaccaagtgttcaggacacgatgataatacgttaagggagttgcaagaccaattaaagatgattaaaattaacaaggatcccaaaaaaattccagagtggttagtagttaataaaatctatattcccgattttgtagtagaggatccgaaacaatctcagatatgggaaatttcaggagcagagtttacatcttccaagtcccataccgcaaatggaatatccattagatttcctagatttactaggataagagaggataaaacgtggaaagaatctactcatctaaacgatttagtaaacttgactaaatcttaatagttacatacaaactgaaaattaaaataacactatttagttggtggtcgccatggatggtgttattgtatactgtctaaacgcgctagtaaaacatggcgaggaaataaatcatataaaaaatgatttcatgattaaaccatgttgtgaaagagtttgtgaaaaagtcaagaacgttcacattggcggacaatctaaaaacaatacagtgattgcagatttgccatatatggataatgcggtatccgatgtatgcaattcactgtataaaaagaatgtatcaagaatatccagatttgctaatttgataaagatagatgacgatgacaagactcctactggtgtatataattattttaaacctaaagatgccattcctgttatcatatctataggaaaggataaagatgtctgtgaactattaatctcatcagacatatcgtgtgcatgcgtggagttaaattcatatcacgtagccattcttcccatggatgtttccttttttaccaaaggaaatgcatcattgattattctcctgtttgatttctctatcgatgcggcacctctcttaagaagtgtaaccgataataatgttattatatctagacaccagcgtctacatgacgagcttccgagttccaattggttcaagttttacataagtataaagtccgactattgttctatattatatatggttgttgatggatctgtgatgcatgcgatagctgataatagaactcacgcaattattagcaaaaatatattagacaatactacgattaacgatgagtgtagatgctgttattttgaaccacagattaggattcttgatagagatgagatgctcaatggatcatcgtgtgatatgaacagacattgtattatgatgaatttacctgatgtaggcgaatttggatctagtatgttggggaaatatgaacctgacatgattaagattgctctttcggtggctggtaatttaataagaaatcgagactacattcccgggagacgaggatatagctactacgtttacggtatagcctctagataatttttttaagcacgaaataaaaaacataattttaaaccaatctatttcatactattttgtgtgatcaccatggacataaagatagatattagtatttctggtgataaatttacggtgactactaggagggaaaatgaagaaagaaaaaaatatctacctctccaaaaagaaaaaactactgatgttatcaaacctgattatcttgagtacgatgacttgttagatagagatgagatgtttactattctagaggaatattttatgtacagaggtctattaggcctcagaataaaatatggacgactctttaacgaaattaaaaaattcgacaatgatgcggaagaacaattcggtactatagaagaactcaagcagaaacttagattaaattctgaagagggagcagataactttatagattatataaaggtacaaaaacaggatatcgtcaaacttactgtatacgattgcatatctatgataggattgtgtgcatgcgtggtagatgtttggagaaatgagaaactgttttctagatggaaatattgtttacgagcgattaaactgtttattgatgatcacatgcttgataagataaaatctatactgcagaatagactagtatatgtggaaatgtcatagaaagttaaaagttaatgagagcaaaaatatataaggttgtattccatatttgttatttttttctgtaatagttagaaaaatacattcgatggtctatctatcagattattatgtgttataaggtactttttctcataataaactagagtatgagtaagatagtgtttttcaaaacatataaatctaaaattgatggatgagatatacagctattaatttcgaaaatatattttaatctgataactttaaacatggatttttaatggtggtttaacgttttaaaaaaagattttgttattgtagtatatgataatattaaaagatggatataaagaatttgctgactgcatgtactattttttacattactacattggctacggcagatatacctacttcgtcactgccacacgctccggtaaacggggcatgtgacgagggagaatatcttgataagaggcataatcaatgttgtaatcagtgtccacctggagaatttgccaaggttagatgtaatggtaacgataacacaaaatgtgaacgctgcccacctcatacatataccgcaatccccaattactctaatggatgtcatcaatgtagaaaatgcccaacaggatcatttgataaggtaaagtgtaccggaacacagaacagtaaatgttcgtgtcttcctggttggtattgcgctactgattcttcacagactgaagattgtcgagattgtataccaaaaaggagatgtccatgcggatactttggtggaatagatgaacaaggaaatcctatttgtaaatcgtgttgtgttggtgaatattgcgactacctacgtaattatagacttgatccatttcctccatgcaaactatctaaatgtaattaattatgattttgatgataatgttaccatacattatatcgctacttggttagtgtattattcagtatgaagacctattaataattacttatcttttgacgatcttgttataattataatataaaaatacttatggcatagtaactcataattgctgacgcgataaattcgtaataatctgttttgttcaaatttttataaggaatctacaggcataaaaataaaaatataatttataatatactcttacagcgcgccatcatgaataacagcagtgaattgattgctgttattaatggatttagaaatagtggacgattttgtgatattaatatagttattaatgatgaaaggataaacgctcacagactcatcctatctggagcctccgaatatttttccattctgttttccaataattttatcgattctaatgaatacgaagttaatctaagtcatttagattatcaaagtgttaacgatttgatcgattacatttatgggatacctttgagcctaactaacgataacgtgaaatatattctttcaaccgctgattttttacaaattggatctgctattacggagtgtgaaaattacatacttaaaaatctttgttctagaaactgtatcgatttctacatatacgctgataaatataataacaagaaaatagaatcagcgtcgtttaacacaatattacaaaatattttgagactcatcaacgatgaaaactttaaatacttaacagaggaatcaatgataaaaattttaagcgatgatatgttaaatataaaaaatgaggatttcgccccactaattctcattaaatggttagagagtactcaacaaccatgcaccgtcgagttacttaaatgcctcagaatatcattgctttccccacaagttataaaatcactttatagtcatcgactggttagttcaatctacgaatgtataacattcttaaacaatatagcattcttggatgaatcatttcctagataccatagcatcgagttgatatctatcggtataagtaattcgcatgataagatttccataaactgctacaatcataaaaaaaatacatgggaaatgatatcttcacgtagatataggtgtagtttcgcagtggccgtcctggataatattatctatatgatgggtggatatgatcagtccccgtatagaagttcaaaggttatagcgtacaatacatgtacaaattcttggatatatgatataccagagctaaaatatcctcgttctaattgtgggggactggctgatgacgaatacatttattgtataggcggcatacgcgatcaggattcatcgttgacatctagtattgatagatggaagccatcaaaaccatattggcagaagtatgctaaaatgcgcgaaccaaaatgtgatatgggggttgcgatgttaaacggattaatatatgttataggtggaatcgttaaaggtgacacgtgtaccgacgcactagagagtttatcagaagatggatggatgaagcatcaacgtcttccaataaaaatgtccaatatgtcgacgattgttcatgatggcaagatttatatatctggaggttacaacaatagtagtgtagttaatgtaatatcgaatctagtccttagctataattcgatatatgatgaatggaccaaattatcatcattaaacattcctagaattaatcccgctctatggtcagcgcataataaattatatgtaggaggaggaatatctgatgatgttcgaactaatacatctgagacatacgacaaagaaaaagattgttggacattggataatggtcacgtgttaccacgcaattatataatgtataaatgcgaaccgattaaacataaatatccattggaaaaaacacagtacacgaatgattttctaaagtatttggaaagttttataggtagttgatagaacaaaatacataattttgtaaaaataaatcactttttatactaatatgacacgattaccaatacttttgttactaatatcattagtatacgctacaccttttcctcagacatctaaaaaaataggtgatgatgcaactctatcatgtaatcgaaataatacaaatgactacgttgttatgagtgcttggtataaggagcccaattccattattcttttagctgctaaaagcgacgtcttgtattttgataattataccaaggataaaatatcttacgactctccatacgatgatctagttacaactatcacaattaaatcattgactgctagagatgccggtacttatgtatgtgcattctttatgacatcaactacaaatgacactgataaagtagattatgaagaatactccacagagttgattgtaaatacagatagtgaatcgactatagacataatactatctggatctacacattcaccggaaactagttctgagaaacctgattatatagataattctaattgctcgtcggtattcgaaatctaagcttaaaaattgaaattttattttttttttttggaatataaataagctcgaagtcgaccaccatggtgggtgaggatagcgtgctgatcaccgagaacatgcacatgaaactgtacatggagggcaccgtgaacgaccaccacttcaagtgcacatccgagggcgaaggcaagccctacgagggcacccagaccatgaagatcaaggtggtcgagggcggccctctccccttcgccttcgacatcctggctaccagcttcatgtacggcagcaaaacctttatcaaccacacccagggcatccccgacttctttaagcagtccttccctgagggcttcacatgggagaggatcaccacatacgaagacgggggcgtgctgaccgctacccaggacaccagcctccagaacggctgcctcatctacaacgtcaagatcaacggggtgaacttcccatccaacggccctgtgatgcagaagaaaacactcggctgggaggccagcaccgagatgctgtaccccgctgacagcggcctgagaggccatagccagatggccctgaagctcgtgggcgggggctacctgcactgctccctcaagaccacatacagatccaagaaacccgctaagaacctcaagatgcccggcttctacttcgtggacaggagactggaaagaatcaaggaggccgacaaagagacctacgtcgagcagcacgagatggctgtggccaggtactgcgacctgcctagcaaactggggcacagctgattaattaatttttatcgatctaattcaacaatgtctggagagctcggtaccaagcttcgcaggatcccgactccggaaccaattactgataaagaagatcatacagttacagacactgtctcatacactacagtaagtacatcatctggaattgtcactactaaatcaaccaccgatgatgcggatctttatgatacgtacaatgataatgatacagtaccaccaactactgtaggcggtagtacaacctctattagcaattataaaaccaaggactttgtagaaatatttggtattaccgcattaattatattgtcggccgtggcaattttctgtattacatattatatatataataaacgttcacgtaaatacaaaacagagaacaaagtctagatttttgacttacataaatgtctgggatagtaaaatctatcatattgagcggaccatctggtttaggaaagacagccatagccaaaagactatgggaatatatttggatttgtggtgtcccataccactagatttcctcgtcctatggaacgagaaggtgttgattaccattacgttaacagagaggccatctggaagggaatagccgccggaaactttctagaacatactgagtttttaggaaatatttacggaacttctaaaacagctgtgaatacagcggctattaataatcgtatttgtgtgatggatctaaacatcgacggtgttagaagtcttaaaaatacgtacctaatgccttactcggtgtatataagacctacctctcttaaaatggttgagaccaagcttcgtcgtagaaacactgaagctaacgatgagattcatcgtcgtgtgatgttggcaaaaactgacatggatgaggcaggtgaagccggtctattcgacactattatcattgaagatgatgtgaatttagcatatagtaagttaattcagatactacaggaccgtattagaatgtattttaacactaattagagacttaagacttaaaacttgataattaataatataactcgtttttatatgtgtctatttcaacgtctaatgtattagttaaatattaaaacttaccacgtaaaacttaaaatttaaaatgatatttcattgacagatagatcacacattatgaactttcaaggacttgtgttaactgacaattgcaaaaatcaatgggtcgttggaccattaataggaaaaggtggattcggtagtatttatactactaatgacaataattatgtagtaaaaatagagcccaaagctaacggatcattatttaccgaacaggcattttatactagagtacttaaaccatccgttatcgaagaatggaaaaaatctcacaatataaagcacgtaggtcttatcacgtgcaaggcatttggtctatacaaatccattaatgtggaatatcgattcttggtaattaatagattaggtgcagatctagatgcggtgatcagagccaataataatagactaccaaaaaggtcggtgatgttgatcggaatcgaaatcttaaataccatacaatttatgcacgagcaaggatattctcacggagatattaaagcgagtaatatagtcttagatcaaatagataagaataaattatatctagtggattacggattggtttctaaattcatgtctaatggcgaacatgttccatttataagaaatccaaataaaatggataacggtactctagaatttacacctatagattcgcataaaggatacgttgtatctagacgtggagatctagaaacacttggatattgtatgattagatggttgggaggtatcttaccatggactaagatatctgaaacaaagaattgtgcattagtaagtgccacaaaacagaaatatgttaacaatactgcgactttgttaatgaccagtttgcaatatgcacctagagaattgctgcaatatattaccatggtaaactctttgacatattttgaggaacccaattacgacaagtttcggcacatattaatgcagggtgtatattattaagtgtggtgtttggtcgataaaaattaaaaaataacttaatttattattgatctcgtgtgtacaaccgaaatcatggcgatgttttacgcacacgctctcggtgggtacgacgagaatcttcatgcctttcctggaatatcatcgactgttgccaatgatgtcaggaaatattctgttgtgtcagtttataataacaagtatgacattgtaaaagacaaatatatgtggtgttacagtcaggtgaacaagagatatattggagcactgctgcctatgtttgagtgcaatgaatatctacaaattggaaatccgatccatgatcaagaaggaaatcaaatctctatcatcacatatcgccacaaaaactactatgctctaagcggaatcgggtacgagagtctagacttgtgtttggaaggagtagggattcatcatcacgtacttgaaacaggaaacgctgtatatggaaaagttcaacatgattattctactatcaaagagaaggccaaagaaatgagtgcacttagtccaggacctatcatcgattaccacgtctggataggagattgtatctgtcaagttactgctgtggacgtacatggaaaggaaattatgaaaatgagattcaaaaagggtgcggtgcttccgatcccaaatctggtaaaagttaaacttggggagaatgatacagaaaatctttcttctactatatcggcggcaccatcgaggtaaccacctctctggaagacagcgtgaatcatgtactcatgaaacgtttggaaactatacgccatatgtggtctgttgtatatgatcattttgatattgtgaatggtaaagaatgctgttatgtgcatacgcattcatctaatcaaaatcctataccgagtactgtaaaaacaaatttgtacatgaagactatgggatcatgcattcaaatggattccatggaagctctagagtatcttagcgaactgaaggaatcaggtggatggagtcccagaccagaaatgcaggaatttgaatatccagatggagtggaagacactgaatcaattgagagattggcagaggagttcttcaatagatcagaacttcaggctggtgaatcagtcaaatttggtaattctattaattgttaaacatacatctgtttcagctaagcaactaagaacacgtatacggcagcagcttccttctatactctcatcttttaccaacacaaagggtggatatttgttcattggagttgataataatacacacaaagtatttggattcacggtgggttacgactacctcagactgatagagaatgatatagaaaagcatatcaaaagacttcgtgttgtgcatttctgtgagaagaaagaggacatcaagtacgcgtgtcgattcatcaaggtatataaacctggggatgagactacctcgacatacgtgtgcgctatcaaagtggaaagatgctgttgtgctgtgtttgcagattggccagaatcatggtatatggatactaatggtatcaagaagtattctccagatgaatgggtgtcacatataaaattttaattaatgtaactatagagaacaaataataaggttgtaatatcatatagacaataactaacaattaattagtaactgttatctcttttttaactaaccaactaactatatacctattaatacatcgtaattatagttcttaacatctattaatcattaattcgcttctttaattttttataaactaacattgttaattgaaaagggataacatgttacagaatataaattatatatggatttttttaaaaaggaaatacttgactggagtatatatttatctcttcattatatagcacgcgtgttttccaatttttccacatcccatataatacaggattataatctcgttcgaacatacgagaaagtggataaaacaatagttgattttttatctaggttgccaaatttattccatattttagaatatggggaaaatattctacatatttattctatggatgatgctaatacgaatattataattttttttctagatagagtattaaatattaataagaacgggtcatttatacacaatctcgggttatcatcatccattaatataaaagaatatgtatatcaattagttaataatgatcatccagataataggataagactaatgcttgaaaatggacgtagaacaagacattttttgtcctatatatcagatacagttaatatctatatatgtattttaataaatcatggattttatatagatgccgaagacagttacggttgtacattattacatagatgtatatatcactataagaaatcagaatcagaatcatacaatgaattaattaagatattgttaaataatggatcagatgtagataaaaaagatacgtacggaaacacaccttttatcctattatgtaaacacgatatcaacaacgtggaattgtttgagatatgtttagagaatgctaatatagactctgtagactttaatagatatacacctcttcattatgtctcatgtcgtaataaatatgattttgtaaagttattaatttctaaaggagcaaatgttaatgcgcgtaataaattcggaactactccattttattgtggaattatacacggtatctcgcttataaaactatatttggaatcagacacagagttagaaatagataatgaacatatagttcgtcatttaataatttttgatgctgttgaatctttagattatctattatccagaggagttattgatattaactatcgtactatatacaacgaaacatctatttacgacgctgtcagttataatgcgtataatacgttggtctatctattaaacaaaaatggtgattttgagacgattactactagtggatgtacatgtatttcggaagcagtcgcaaacaacaacaaaataataatggaagtactattgtctaaacgaccatctttgaaaattatgatacagtctatgatagcaattactaaacataaacagcataatgcagatttattgaaaatgtgtataaaatatactgcgtgtatgaccgattatgatactcttatagatgtacagtcgctacagcaatataaatggtatattttaagatgtttcgatgaaatagatatcatgaagagatgttatataaaaaataaaactgtattccaattagttttttgtatcaaagacattaatactttaatgagatacggtaaacatccttctttcgtgaaatgcactagtctcgacgtatacggaagtcgtgtacgtaatatcatagcatctattagatatcgtcagagattaattagtctattatccaagaagctggatcctggagataaatggtcgtgttttcctaacgaaataaaatataaaatattggaaaactttaacgataacgaactatccacatatctaaaaatcttataaacattattaaaatataaaatctaagtaggataaaatcacactacatcattgtttccttttagtgctcgacagtgtatactatttttaacgctcataaataaaaatgaaaacgatttccgttgttacgttgttatgcgtactacctgctgttgtttattcaacatgtactgtacccactatgaataacgctaaattaacgtctaccgaaacatcgtttaatgataaccagaaagttacgtttacatgtgatcagggatatcattctttggatccaaatgctgtctgtgaaacagataaatggaaatacgaaaatccatgcaaaaaaatgtgcacagtttctgattatgtctctgaactatataataaaccgctatacgaagtgaattccaccatgacactaagttgcaacggcgaaacaaaatattttcgttgcgaagaaaaaaatggaaatacttcttggaatgatactgttacgtgtcctaatgcggaatgtcaacctcttcaattagaacacggatcgtgtcaaccagttaaagaaaaatactcatttggggaatatatgactatcaactgtgatgttggatatgaggttattggtgcttcgtacataagttgtacagctaattcttggaatgttattccatcatgtcaacaaaaatgtgatatgccgtctctatctaacggattaatttccggatctacattttctatcggtggcgttatacatcttagttgtaaaagtggttttacactaacggggtctccatcatccacatgtatcgacggtaaatggaatcccatactcccaatatgtgtacgaactaacgaaaaatttgatccagtggatgatggtcccgacgatgagacagatttgagcaaactctcgaaagacgttgtacaatatgaacaagaaatagaatcgttagaagcaacttatcatataatcatagtggcgttgacaattatgggcgtcatatttttaatctccgttatagtattagtttgttcctgtgacaaaaataatgaccaatataagttccataaattgctaccgtaaatataaatccgttaaaataattaataatttaataacaaacaagtatcaaaagattaaagacttatagctagaatcaattgagatgtcttcttcagtggatgttgatatctacgatgccgttagagcatttttactcaggcactattataacaagagatttattgtgtatggaagaagtaacgccatattacataatatatacaggctatttacaagatgcgccgttataccgttcgatgatatagtacgtactatgccaaatgaatcacgtgttaaacaatgggtgatggatacacttaatggtataatgatgaatgaacgcgatgtttctgtaagcgttggcaccggaatactattcatggaaatgtttttcgattacaataaaaatagtatcaacaatcaactaatgtatgatataattaatagcgtatctataattctagctaatgagagatatagaagcgcttttaacgacgatggtatatacatccgtagaaatatgattaacaagttgtacggatacgcatctctaactactattggcacgatcgctggaggtgtttgttattatctgttgatgcatctagttagtttgtataaataattatttcaatatactagttaaaattttaagattttaaatgtataaaaaactaataacgtttttatttgtaataggtgcattagcatcctattcgaataatgagtacactccgtttaataaactgagtgtaaaactctatatagatggagtagataatatagaaaattcatatactgatgataataatgaattggtgttaaattttaaagagtacacaatttctattattacagagtcatgcgacgtcggatttgattccatagatatagatgttataaacgactataaaattattgatatgtataccattgactcgtctactattcaacgcagaggtcacacgtgtagaatatctaccaaattatcatgccattatgataagtacccttatattcacaaatatgatggtgatgagcgacaatattctattactgcagagggaaaatgctataaaggaataaaatatgaaataagtatgatcaacgatgatactctattgagaaaacatactcttaaaattggatctacttatatatttgatcgtcatggacatagtaatacatattattcaaaatatgatttttaaaaatttaaaatatattatcacttcagtgacagtagtcaaataacaaacaacaccatgagatatattataattctcgcagttttgttcattaatagtatacatgctaaaataactagttataagtttgaatccgtcaattttgattccaaaattgaatggactggggatggtctatacaatatatcccttaaaaattatggcatcaagacgtggcaaacaatgtatacaaatgtaccagaaggaacatacgacatatccgcatttccaaagaatgatttcgtatctttctgggttaaatttgaacaaggcgattataaagtggaagagtattgtacgggactatgcgtcgaagtaaaaattggaccaccgactgtaacattgactgaatacgacgaccatatcaatttgtacatcgagcatccgtatgctactagaggtagcaaaaagattcctatttacaaacgcggtgacatgtgtgatatctacttgttgtatacggctaacttcacattcggagattctaaagaaccagtaccatatgatatcgatgactacgattgcacgtctacaggttgcagcatagactttgtcacaacagaaaaagtgtgcgtgacagcacagggagccacagaagggtttctcgaaaaaattactccatggagttcgaaagtatgtctgacacctaaaaagagtgtatatacatgcgcaattagatccaaagaagatgttcccaatttcaaggacaaaatggccagagttatcaagagaaaatttaatacacagtctcaatcttatttaactaaatttctcggtagcacatcaaatgatgttaccacttttcttagcatgcttaacttgactaaatattcataactaatttttattaatgatacaaaaacgaaataaaactgcatattatacactggttaacgcccttataggctctaaccattttcaagatgaggtccctgattatagtccttctgttcccctctatcatctactccatgtctattagacgatgtgagaagactgaagaggaaacatggggattgaaaatagggttgtgtataattgccaaagatttctatcccgaaagaactgattgcagtgttcatctcccaactgcaagtgaaggattgataactgaaggcaatggattcagggatatacgaaacaccgataaattataaaaaaagcaatgtgtccgctgtttccgttaataatactattttcgtaactggcggattattcataaataactctaatagcacgatcgtggttaacaatatggaaaaacttgacatttataaagacaaacaatggtcgattatagaaatgcctatggctagggtatatcacggcattgactcgacatttggaatgttatattttgccggaggtctatccgttaccgaacaatatggtaatttagagaaaaacaacgagatatcttgttacaatcctagaacgaataagtggtttgatatttcatatactatttataagatatccatatcatcattgtgtaaactaaataacgtcttctatgtatttagtaaggacattggatatgtggaaaagtatgatggtgcatggaagttagtacatgatcgtctccccgctataaaggcattatcaacttctccttattgattgaaaatgaaaatataaatagtttttatgtatagcagtattaccctatagttttattgcttactactaacatggatacagatgttacaaatgtagaagatatcataaatgaaatagatagagagaaagaagaaatactaaaaaatgtagaaattgaaaataataaaaacattaacaagaatcatcccaatgaatatattagagaagcactcgttattaataccagtagtaatagtgattccattgataaagaagttatagaatgtatcagtcacgatgtaggaatatagatcatatctactaatttttataatcgatacaaaacataaaaaacaactcgttattacatagcaggcatggaatccttcaagtattgttttgataacgatggcaagaaatggattatcggaaatactttatattctggtaattcaatactctataaggtcagaaaaaatttcactagttcgttctacaattacgtaatgaagatagatcacaaatcacacaagccattgttgtctgaaatacgattctatatatctgtattggatcctttgactatcgacaactggacacgggaacgtggtataaagtatttggctattccagatctgtatggaattggagaaaccgatgattatatgttcttcgttataaagaattcgggaagagtattcgccccaaaggatactgaatcagtcttcgaagcatgcgtcactatgataaacacgttagagtttatacactctcgaggatttacccatggaaaaatagaaccgaggaatatactgattagaaataaacgtctttcactaattgactattctagaactaacaaactatacaagagtggaaactcacatatagattacaacgaggacatgataacttcaggaaatatcaattatatgtgtgtagacaatcatcttggagcaacagtttcaagacgaggagatttagaaatgttgggatattgcatgatagaatggttcggtggcaaacttccatggaaaaacgaaagtagtataaaagtaataaaacaaaaaaaagaatataaaaaatttatagctactttctttgaggactgttttcctgaaggaaatgaacctctggaattagttagatatatagaattagtatacacgttagattattctcaaactcctaattatgacagactacgtaaactgtttatacaagattgaaattatattcttttttttatagagtgtggtagtgttacggatatctaatattaatattagactatctctatcgcgctacacgaccaatatcgattactatggatatcttctatgaaaggagagaatgtatttatttctccagcgtcaatctcgtcagtattgacaatactgtattatggagctaatggatccactgctgaacagctatcaaaatatgtagaaacggaggagaacacggataaggttagcgctcagaatatctcattcaaatccatgaataaagtatatgggcgatattctgccgtgtttaaagattcctttttgagaaaaattggcgataagtttcaaactgttgacttcactgattgtcgcactatagatgcaatcaacaagtgtgtagatatctttactgaggggaaaatcaatccactattggatgaaccattgtctcctagcaattagtgccgtatactttaaagcaaaatggttgacgccattcgaaaaggaatttaccagtgattatcccttttacgtatctccgacggaaatggtagacgtaagtatgatgtctatgtacggcaaggcatttaatcacgcatctgtaaaagaatcattcggcaacttttcaatcatagaactgccatatgttggagatactagtatgatggtcattcttccagacaagattgatggattagaatccatagaacaaaatctaacagatacaaattttaagaaatggtgtgactttatggatgctatgtttatagatgttcacattcccaagtttaaggtaacaggctcgtataatctggtggatactctagtaaagtcaggactgacagaggtgttcggttcaactggagattatagcaatatgtgtaatttagatgtgagtgtcgacgctatgatccacaaaacgtatatagatgtcaatgaagagtatacagaagcagctgcagcaacttctgtactagtggcagactgtgcatcaacaattacaaatgagttctgtgcagatcatccgttcatctatgtgattaggcatgttgatggaaaaattcttttcgttggtagatattgctctccgacaactaattgttaaccattttttttaaaaaaaatagaaaaaacatgtggtattagtgcaggtcgttgttcttccaattgcaattggtaagatgacggccaactttagtacccacgtcttttcaccacagcactgtggatgtgacagactgaccagtattgatgacgtcaaacaatgtttgactgaatatatttattggtcgtcctatgcataccgcaacaggcaatgcgctggacaattgtattccacactcctctcttttagagatgatgcggaattagtgttcatcgacattcgcgagctggtaaaaaatatgccgtgggatgatgtcaaagattgtacagaaatcatccgttgttatataccggatgagcaaaaaaccatcagagagatttcggccatcatcggactttgtgcatatgctgctacttactggggaggtgaagaccatcccactagtaacagtctgaacgcattgtttgtgatgcttgagatgctaaattacgtggattataacatcatattccggcgtatgaattgatgagttgtacatcttgacattttctttcttctcttctccctttcttctcttctcccttcctccctcttctccctttcccagaaacaaacttttttacccactataaaataaaatgagtatactacctattatatttcttcctatatttttttattcttcattcgttcagacttttaacgcgtctgaatgtatcgacaaagggcaatattttgcatcattcatggagttagaaaacgagccagtaatcttaccatgtcctcaaataaatacgctatcatccggatataatatattagatattttatgggaaaaacgaggagcggataatgatagaattataccgatagataatggtagcaatatgctaattctgaacccgacacaatcagactctggtatttatatatgcattaccacgaacgaaacctactgtgacatgatgtcgttaaatttgacaatcgtgtctgtctcagaatcaaatatagatcttatctcgtatccacaaatagtaaatgagagatctactggcgaaatggtatgtcccaatattaatgcatttattgctagtaacgtaaacgcagatattatatggagcggacatcgacgccttagaaataagagacttaaacaacggacacctggaattattaccatagaagatgttagaaaaaatgatgctggttattatacatgtgttttagaatatatatacggtggcaaaacatataacgtaaccagaattgtaaaattagaggtacgggatagaataataccttctactatgcaattaccagatggcattgtaacttcaataggtagtaatttgactattgcatgcagagtatcgttgagacctcccacaacggacaccgacgtcttttggataagtaatggtatgtattacgaagaagatgatggggacggaaacggtagaataagtgtagcaaataaaatctatatgaccgataagagacgtgttattacatcccggttaaacattaatcctgtcaaggaagaagatgctacaacgtttacgtgtatggcgtttactattcctagcatcagcaaaacagttactgttagtataacgtgaatgtatgttgttacatttccatgtcaattgagtttataagaatttttatacattatcttccaacaaacaattgacgaacgtattgctatgattaactcccacgatactatgcatattattaatcattaacttgcagactatacctagtgctattttgacatactcgtgttcttgtgtaattgcggtatctatattattaaagtacgtaaatctagctatagttttattatttaattttagataatataccgtctccttatttttaaaaattgccacatcctttattaaatcatgaatgggaatttctatgtcatcgttagtatattgtgaacaacaagagcagatatctataggaaagggtggaatgcgatacattgatctatgtagttttaaaacacacgcgaactttgaagaatttatataaatcattccatcgatacatccttctatgttgacatgtatatatccaggaattcttttattaatgtcaggaaatgtataaactaaaacattgcccgaaagcggtgcctctatctgcgttatatccgttcttaacttacaaaatgtaaccaatacctttgcatgacttgttttgttcggcaacgttagtttaaacttgacgaatggattaattacaatagcatgatccgcgcatctattaagtttttttactttaacgcccttgtatgtttttacagagactttatctaaatttctagtgcttgtatgtgttataaatataacgggatatagaaccgaatcacctaccttagatacccaattacattttatcagatccagataataaacaaattttgtcgccctaactaattctatattgttatatattttacaattggttatgatatcatgtaataacttggagtctaacgcgcatcgtcgtacgtttatacaattgtgatttagtgtagtatatctacacatgtatttttccgcactatagtattctggactagtgataaaactatcgttatatctgtcttcaatgaactcatcgagatattgctctctgtcatattcatacacctgcataaactttctagacatcttacaatccgtgttattttaggatcatatttacatatttacgggtatatcaaagatgttagattagttaatgggaatcgtctataataatgaatattaaacaattatatgaggacttttaccacaaagcatcataaaaatgagtcgtcgtctgatttatgttttaaatatcaaccgcaaatcaactcataaaatacaagagaatgaaatatatacatattttagtcattgcaatatagaccatacttctacagaacttgattttgtagttaaaaactatgatctaaacagacgacaacctgtaactgggtatactgcactacactgctatttgtataataattactttacaaacgatgtactgaagatattattaaatcatgacgtaaatgtaacgatgaaaaccagtagcggacgtatgcctgtttatatattgcttactagatgttgtaatatttcacatgatgtagtgatagatatgatagacaaagataaaaaccacttattacatagagactattccaacctattactagagtatataaaatctcgttacatgttattgaaggaagaggatatcgatgagaacatagtatccactttattagataagggaatcgatcctaactttaaacaagacggatatacagcgttacattattattatttgtgtctcgcacacgtttataaactaggtgagtgtagaaaaccgataacgataaaaaaggccaagcgaattatttctttgtttatacaacatggagctaatctaaacgcgttagataattgtggtaatacaccattccatttgtatcttagtattgaaatgtgtaataatattcatatgactaaaatgctgttgacttttaatccgaatttcaaaatatgtaataatcatggattaacgcctatactatgttatataacttccgactacatacaacacgatattcttgttatgttaatacatcactatgaaacaaatgttggagaaatgccgatagatgagcgtcgtatgatcgtattcgagtttatcaaaacatattctacacgtccggcagattcgataacttatttgatgaataggtttaaaaatataaatatttatacccgctatgaaggaaagacattattacacgtagcatgtgaatataataatacacaagtaatagattatcttatacgtatcaacggagatataaatgcgttaaccgacaataacaaacacgctacacaactcattatagataacaaagaaaattccccatataccattaattgtttactgtatatacttagatatattgtagataagaatgtgataagatcgttggtggatcaacttccatctctacctatcttcgatataaaatcatttgagaaattcatatcctactgtatacttttagatgacacattttacgataggcacgttaagaatcgcgattctaaaacgtatcgatacgcattttcaaaatacatgtcgtttgataaatacgatggtataataactaaatgtcacgacgaaacaatgttactcaaactgtccactgttctagacactacactatatgcagttttaagatgtcataattcgagaaagttaagaagatacctcaacgagttaaaaaaatataataacgataagtcctttaaaatatattctaatattatgaatgagagataccttaatgtatattataaagatatgtacgtgtcaaaggtatatgataaactatttcctgttttcacagataaaaattgtctactaacattactaccttcagaaattatatacgaaatattatacatgctgacaattaacgatctttataatatatcgtatccacctaccaaagtatagttgtatttttctcatgcgatgtgtgtaaaaaaactgatattatataaatattttagtgccgtataataaagatgacgatgaaaatgatggtacatatatatttcgtatcattattgttattgctattccacagttacgccatagacatcgaaaatgaaatcacagaattcttcaataaaatgagagatactctaccagctaaagactctaaatggttgaatccagcatgtatgttcggaggcacaatgaatgatatagccgctctaggagagccattcagcgcaaagtgtcctcctattgaagacagtcttttatcgcacagatataaagactatgtggttaaatgggagaggctagaaaagaatagacggcgacaggtttctaataaacgtgttaaacatggtgatttatggatagccaactatacatctaaattcagtaaccgtaggtatttgtgcaccgtaactacaaagaatggtgactgtgttcagggtatagttagatctcatattaaaaaacctccttcatgcattccaaaaacatatgaactaggtactcatgataagtatggcatagacttatactgtggaattctttacgcaaaacattataataatataacttggtataaagataataaggaaattaatatcgacgacattaagtattcacaaacgggaaaggaattaattattcataatccagagttagaagatagcggaagatacgactgttacgttcattacgacgacgttagaatcaagaatgatatcgtagtatcaagatgtaaaatacttacggttataccgtcacaagaccacaggtttaaactaatactagatccgaaaatcaacgtaacgataggagaacctgccaatataacatgcactgctgtgtcaacgtcattattgatcgacgatgtactgattgaatgggaaaatccatccggatggcttataggattcgattttgatgtatactctgttttaactagtagaggcggtatcaccgaggcgaccttgtactttgaaaatgttactgaagaatatataggtaatacatataaatgtcgtggacacaactattattttgaaaaaacccttacaactacagtagtattggagtaaatatacaatgcatttttatatacattactgaattattattactgaattattattactgaattattattaattatatcgtatttgtgctatagaatggatgaagatacgcgactatctaggtatttgtatctcaccgatagagaacatataaatgtagactctattaaacagttgtgtaaaatatcagatcctaatgcatgttatagatgtggatgtacggctttacatgagtacttttataattatagatcagtcaacggaaaatacaagtatagatacaacggttactatcaatattattcatctagcgattatgaaaattataatgaatattattatgatagaactggtatgaacagtgagagtgataatatatcaatcaaaacagaatatgaattctatgatgaaacacaagatcaaagtacacaactagtaggttacgacattaaactcaaaaccaatgaggatgattttatggctatgatagatcagtgggtgtccatgattatatagatgaatcaattaataaagtagtatatggaagagagtctcacgtaagatggcgggatatatggcaagaacataatgatggcgtatacagtataggaaaggagtgcatagataatatatacgaagacaaccataccgtagacgaattctacaagatagacagcgtatcagatgtagatgacgcggaacacatatctccgataactaaaaaaccatagaatcagttgatgataatacctacatttctaatcttccgtataccatcaaatacaaaatattcgagcaacaataagtattttttatacctttaaaactgataaataaattttttctagtgatattttggcaagatgagaatcctatttctcatcgctttcatgtatgggtgtgttcactcatatgttaacgcggttgaaaccaaatgtccaaatctagacattgtaacatcttctggagaatttcattgttcaggatgtgtggaacatatgcctgagtttagctatatgtattggttggcaaaggatatgaaatcggacgaggataccaagtttatagaacatctgggtgatggcatcaaagaagatgaaaccgttcgtaccacagatagtggaatcgtcactctacgtaaagtccttcatgtgactgatactaataaatttgataattataggttcacttgtgtcctcgctacgctagatggcatttataaaaagaatgtttgctgaagtagttgtgtgctactatttttatttatgatataatctaatggaattaatttgaattgatatttatccaatactaaagattatattagaatcaaattaatcttttatacgagaaaaaataacgacatacgtcgtcaacaaattaaactttttatttattagttaactagcttatagaacttgctcattgttatgtttctaaaacgggtacggcatataggacaattatccgacgcaccggtttctcttcgtgttctatgccatatattgatgcatgttatgcaaaatatatgagtacacgaatccaataaaccaaagtatctatcgttttgagtaaacaacttcatagcaaattccacattctttttctttacttactctatacacgtcctcgtatttatttagtattttgatgatatccaactcagaaatggttgttgtattattgggtgtatttggagtataggtattattagctatgtaccaatttaccaaccctcttaatattgattgataatcacatcggttatccaattaataactaaattgtagtgtatatatagaccatatatgtttctatttttttgacagttacgtatagtttcagtaagttttgattgttgtattcctgtatctctagataagttagtcatatagtcccttccggcgatacgttttttccaagcccgaaattgattagccaaatgtgtatttatttttgtgatattgatataatatttcggataatgcatactgttagtcttatatcatttggttcatctatgtattgtaatattgttacatgatctatagatgatgtattgattttggcaggatcgaattccatatccgcgactaaacagtgaaaaaaatgtaaatactttttaaattttaaattagtaaaacttttttttattttttatgattccaaaaatactgaatacaaagtcctaaattataaatatggagatcatactaccacaacttattattatgtatacaaggccggtgtaatagatagatatatataattctattacaccggcagacaattaccgaccggtatttgtcgttaccaacataccgtataatatgtaatatacaattccataacccattgacagttgttatacatcaaaattgcaattcttttgattacgatgttataagaatgtagttaattgatgtatgatgttaatgtgtcctctttcctcttataacatcgtaatcaaaaacttttttataatatatacctaataatgtgtcttaatagttctcgtgattcgtcaaacaatcattcttataaaatataataaagcaacgtaaaaacacataaaaataagcgtaactaataagacaatggatatttacgacgataaaggtctacagactattaaactgtttaataatgaatttgattgtataaggaatgacatcagagaattatttaaacatgtaactgattccgatagtatacaacttccgatggaagacaattctgatattatagaaaatatcagaaaaatactatatagacgattaaaaaatgtagaatgtgttgacatcgataacacaataacttttatgaaatacgatccaaatgatgataataagcgtacgtgttctaattgggtacccttaactaataactatatggaatattgtctagtaatatatttggaaacaccgatatgtggaggcaaaataaaattataccaccctacaggaaatataaagtcggataaggatattatgtttgcaaagactctagactttaaatcaacgaaagtgttaactggacgtaaaacaattgccgttctagacatatccgtttcatataatagatcaatgactactattcactacaacgacgacgttgatatagatatacatactgataaaaatggaaaagagttatgttattgttatataacaatagatgatcattacttggttgatgtggaaactataggagttatagtcaatagatctggaaaatgtctgttagtaaataaccatctaggtataggtatcgttaaagataaacgtataagcgatagttttggagatgtatgtatggatacaatatttgacttttctgaagcacgagagttattttcattaactaatgatgataacaggaatatagcatgggacactgataaactagacgatgatacagatatatggactcccgtcacagaagatgattacaaatttctttctagactagtattgtatgcaaaatctcaatcggatactgtatttgactattatgttcttactggtgatacggaaccacccactgtattcattttcaaggtaactagattttactttaatatgccgaaataaaaaatttttgtataatatctagaggtagaggtattgtttagataaatacaaataacatagatacatcgcatacttagcatttttataaatatacataagacatacactttatacatttttgtaaaaatactcataaaaaaatttataaaaattatggcacaaccatatcttgtataggtagtttagttcgtcgagtgaacctataaacagataatagacaacacataataatgcctactaatacaagcataataccgggagatgggatatatgacgttgtagtgtttgggttttctgaacgttgatagtctactaatactacatgctgacatctaatgcctgtataaccatgagagcatctacaatacataccgtcaatatctctagcgtggatacagtcaccgtgtaaacaatatccatctccctctggaccgcataatctgatagctggaatatctgttgtagcgtttgtaatttctggcaatgtcgtttcgatagcgttaccactatcggcgaatgatctgattatcatagcagcgaacaacaacatcagataatttatcaacatttttgatggattctgtgtttatgctgtttctcagtgtgtgtttatgacaagattgggaattttatattattaattcagtaatataaactaataatatattgttaattgtgtaaataatataaaaataacaatacaatattgaatgtgttgctgttaaaaatgtatgtgttaatataatagaataaaataaatgagtatgatcattttagataacgattgattttatcattaccgcttcattcttatattctttgcttacggaacctatatttagaaacatctactaacaattttttatgcttgcattattaatggtatgtaatatgattgattgtgtacgcaataccaatttgttaagtatgaatacggggtacaaacataaattgaaatttaacattatttatttatgatatatatcgttatcgttaggtctataccatggatatctttaaagaactaatcttaaaacaccctgatgaaaatgttttgatttctccagtttccattttatctactttatctattctaaatcatggagcagctggttctacagctgaacaactatcaaaatatatagagaatatgaatgagaatacacccgatgacaataatgatgacatggaggtagatattccgtattgtgcgacactagctaccgcaaataaaatatacggtagcgatagtatcgagttccacgcctccttcctacaaaaaataaaagacgattttcaaactgtaaactttaataatgctaaccaaacaaaggaactaatcaacgaatgggttaagacaatgacaaatggtaaaattaattccttattgactagtccgctatccattaatactcgtatgacagttgttagcgccgtccattttaaagcaatgtggaaatatccattttctaaacatcttacatatacagacaagttttatatttctaagaatatagttaccagcgttgatatgatggtgggtaccgagaataacttgcaatatgtacatattaatgaattattcggaggattctctattatcgatattccatacgagggaaactctagtatggtaattatactaccggacgacatagaaggtatatataacatagaaaaaaatataacagatgaaaaatttaaaaaatggtgtggtatgttatctactaaaagtatagacttgtatatgccaaagtttaaagtggaaatgacagaaccgtataatctggtaccgattttagaaaatttaggacttactaatatattcggatattatgcagattttagcaagatgtgtaatgaaactatcactgtagaaaaatttctacatacgacgtttatagatgttaatgaggagtatacagaagcatcggccgttacaggagtatttacgattaacttttcgatggtatatcgtacgaaggtctacataaaccatccattcatgtacatgattaaagacaccacaggacgtatactttttatagggaaatactgctatccgcaataaatataaacaaatagacttttataaagagtcttcaacgataagtatatcgacatactacttatgctgcgaaagattctgaacgagaacgactatctcaccctcttggatcatatccgcactgctaaatactaaatctccactacactttttatcatcttatgaggaatgattgccttcgtgaaataggaataattagcaccagaatagctatggattattgtggtagagagtgcactattctatgtcgtctactggatgaagatgtgacgtacaaaaaaataaaactagaaattgaaacgtgtcacaacttatcaaaacatatagatagacgaggaaacaatgcgctacattgttacgtctccaataaatgcgatacagacattaagattgttctctcgcggagtcgagagactttgtagaaacaacgaaggattaactccgctaggagtatacagtaagcatagatacgtaaaatctcagattgtgcatctactgatatccagctattcaaattcctctaacgaactcaagtcgaatataaatgatttcgatctgtattcggataatatcgacttacgtctgctaaaatacctaattgtggataaacggatacgtccgtccaagaatacgaattatgcaatcaatggtctcggattggtggatatatacgtaacgacgcctaatccgagaccagaagtattgctatggcttcttaaatcagaatgttacagcaccggttacgtatttcgtacctgtatgtacgacagtgatatgtgtaagaactctcttcattactatatatcgtctcatagagaatctcaatctctatccaaggatgtaattaaatgtttgatcgataacaatgtttccatccatggcagagacgaaggaggatctttacccatccaatactactggtctttctcaaccatagatatagagattgttaaattattattaataaaggatgtggacacgtgtagagtatacgacgtcagccctatattagaggcgtattatctaaacaagcgatttagagtaaccccatataatgtagacatggaaatcgttaatcttcttattgagagacgtcatactcttgtcgacgtaatgcgtagtattacttcgtacgattccagagaatataaccactacatcatcgataacattctaaagagatttagacaacaggatgaatccatcgtacaagccatactgataaactacttacattacggcgatatggtcgttcgatgcatgttagataacggacaacaactatcctctacacgactactttgttaataataatctcgtcgatgtaaacgtcgtaaggtttatcgtggaaaatatggacacgcggctgtaaatcacgtatcgaacaatggccgtctatgtatgtacggtctgatattatcgagatttaataattgcgggtatcactgttatgaaaccatactgatagatgtatttgatatactaagcaagtacatggatgatatagatatgatcgataactctactatattacgcggtcgatgtcaataatatacaatttgcaaagcggttattggaatatggagcgagtatcacgctcgataatcaatacggccatccagaaaagcagttacagaagagaaaacaaaacgaaatcgttgttctacaagatgtctctccctacgacgattactacgtaaaaaagatactagcctactgcctattaagggacgagtcattcgcggaactacatagtaaattctgtttaaacgaggactataaaagtgtatttatgaaaaatatatcattcgataagatagattccatcatcgtgacataagtcgcctcaaagagattcgaatctccgacaccgacctgtatacggtatcacagctatcttaaagccatacattcagacagtcacatttcatttcccatgtacgacgatctcatagaacagtgccatctatcgatggagcgtaaaagtaaactcgtcgacaaagcactcaataaattagagtctaccatcggtcaatctagactatcgtatttgcctccggaaattatgcgcaatatcatctaaacagtatgttgtacggaaagaaccattacaaatattatccatgatagaaagaaaatatctatatgattggagaagtaggaaacaggaacaagacaacgattactacattattaaatcatgaagtccgtattatactcgtatatattgtttctctcatgtataataataaacggaagagatatagcaccgcatgcaccatccgatggaaagtgtaaagacaacgaatacaaacgccataatttgtgtccgggaacatacgcttccagattatgcgatagcaagactaacacacgatgtacgccgtgtggttcgggtaccttcacatctcgcaataatcatttacccgcttgtctaagttgtaacggaagacgcgatcgtgtaacacgactcacaatagaatctgtgaatgctctcccggatattattgtcttctcaaaggatcatccggatgcaaggcatgtgtttcccaaacaaaatgtggaataggatacggagtatccggagacgtcatctgttctccgtgtggtctcggaacatattctcacaccgtctcttccgcagataaatgcgaacccgtacccagaaatacgtttaactatatcgatgtggaaattaacctgtatccagttaacgacacgtcgtgtactcggacgaccactaccggtctcagcgaatccatctcaacgtcggaactaactattactatgaatcataaagactgtaatcccgtatttcgtgatggatacttctccgttcttaataaggtagcgacttcaggtttctttacaggagaaaggtgtgcactctgaatttcgagattaaatgcaataacaaagattcttcctccaaacagttaacgaaagcaaagaatgatactatcatgccgcattcggagacagtaactctagtgggcgacatctatatactatatagtaataccaatactcaagactacgaaactgatacaatctcttatcatgtgggtaatgttctcgatgtcgatagccatatgcccggtagttgcgatatacataaactgatcactaattccaaacccacccactttttatagtaagtttttcacccataaataataaatacaataattaatttctcgtaaaagtagaaaatatattctaatttattgcacggtaaggaagtagaatcataaagaacagtactcaatcaatagcaattatgaaacaatatatcgtcctggcatgcatgtgcctggcggcagctgctatgcctgccagtcttcagcaatcatcctcatcctcctcctcgtgtacggaagaagaaaacaaacatcatatgggaatcgatgttattatcaaagtcacaaagcaagaccaaacaccgaccaatgataagatttgccaatccgtaacggaaattacagagtccgagtcagatccagatcccgaggtggaatcagaagatgattccacatcagtcgaggatgtagatcctcctaccacttattactccatcatcggtggaggtctgagaatgaactttggattcaccaaatgtcctcagattaaatccatctcagaatccgctgatggaaacacagtgaatgctagattgtccagcgtgtccccaggacaaggtaaggactctcccgcgatcactcatgaagaagctcttgctatgatcaaagactgtgaagtgtctatcgacatcagatgtagcgaagaagagaaagacagcgacatcaagacccatccagtactcgggtctaacatctctcataagaaagtgagttacgaagatatcatcggttcaacgatcgtcgatacaaaatgcgtcaagaatctagagtttagcgttcgtatcggagacatgtgcaaggaatcatctgaacttgaggtcaaggatggattcaagtatgtcgacggatcggcatctgaaggtgcaaccgatgatacttcactcatcgattcaacaaaactcaaagcgtgtgtctgaatcgataactctattcatctgaaattggatgagtagggttaatcgaacgattcaggcacaccacgaattaaaaaagtgtaccggacactatattccggtttgcaaaacaaaaatgttcttaactacattcacaaaaagttacctctcgcgacttcttctttttctgtctcaatagtgtgatacgattatgacactattcctattcctattcctatttcctttcagagtatcacaaaaatattaaacctctttctgatggtctcataaaaaaagttttacaaaaatatttttattctctttctctctttgatggtctcataaaaaaagttttacaaaaatatttttattctctttctctctttgatggtctcataaaaaaagttttacaaaaatatttttattctctttctctctttgatggtctcataaaaaaagttttacaaaaatatttttattctctttctctctttgatggtctcataaaaaaagttttacaaaaatatttttattctctttctctctttgatggtctcataaaaaaagttttacaaaaatatttttattctctttctctctttgatggtctcataaaaaaagttttacaaaaatatttttattctctttctctctttgatggtctcataaaaaaagttttacaaaaatatttttattctctttctctctttgatggtctcataaaaaaagttttacaaaaatatttttattctctttctctctttgatggtctcataaaaaaagttttacaaaaatatttttattctctttctctctttgatggtctcataaaaaaagttttacaaaaatatttttattctctttctctctttgatggtctcataaaaaaagttttacaaaaatatttttattctctttctctctttgatggtctcataaaaaagttttacaaaaatatttttattctctttctctctttgatggtctcataaaaaagttttacaaaaatatttttattctctttctctctttgatggtctcataaaaaaagttttacaaaaatatttttattctctttctctctttgatggtctcataa

SEQ ID NO: 13 - DNA, 201444 bp, Artificial Sequence
  GLV-1h190
ttatgagaccatcaaagagagaaagagaataaaaatatttttgtaaaactttttttatgagaccatcaaagagagaaagagaataaaaatatttttgtaaaacttttttatgagaccatcaaagagagaaagagaataaaaatatttttgtaaaacttttttatgagaccatcaaagagagaaagagaataaaaatatttttgtaaaactttttttatgagaccatcaaagagagaaagagaataaaaatatttttgtaaaactttttttatgagaccatcaaagagagaaagagaataaaaatatttttgtaaaactttttttatgagaccatcaaagagagaaagagaataaaaatatttttgtaaaactttttttatgagaccatcaaagagagaaagagaataaaaatatttttgtaaaactttttttatgagaccatcaaagagagaaagagaataaaaatatttttgtaaaactttttttatgagaccatcaaagagagaaagagaataaaaatatttttgtaaaactttttttatgagaccatcaaagagagaaagagaataaaaatatttttgtaaaactttttttatgagaccatcaaagagagaaagagaataaaaatatttttgtaaaactttttttatgagaccatcaaagagagaaagagaataaaaatatttttgtaaaactttttttatgagaccatcaaagagagaaagagaataaaaatatttttgtaaaactttttttatgagaccatcaaagagagaaagagaataaaaatatttttgtaaaactttttttatgagaccatcagaaagaggtttaatatttttgtgatactctgaaaggaaataggaataggaataggaatagtgtcataatcgtatcacactattgagacagaaaaagaagaagtcgcgagaggtaactttttgtgaatgtagttaagaacatttttgttttgcaaaccggaatatagtgtccggtacacttttttaattcgtggtgtgcctgaatcgttcgattaaccctactcatccaatttcagatgaatagagttatcgattcagacacacgctttgagttttgttgaatcgatgagtgaagtatcatcggttgcaccttcagatgccgatccgtcgacatacttgaatccatccttgacctcaagttcagatgattccttgcacatgtctccgatacgaacgctaaactctagattcttgacgcattttgtatcgacgatcgttgaaccgatgatatcttcgtaactcactttcttatgagagatgttagacccgagtactggatgggtcttgatgtcgctgtctttctcttcttcgctacatctgatgtcgatagacacttcacagtctttgatcatagcaagagcttcttcatgagtgatcgcgggagagtccttaccttgtcctggggacacgctggacaatctagcattcactgtgtttccatcagcggattctgagatggatttaatctgaggacatttggtgaatccaaagttcattctcagacctccaccgatgatggagtaataagtggtaggaggatctacatcctcgactgatgtggaatcatcttctgattccacctcgggatctggatctgactcggactctgtaatttccgttacggattggcaaatcttatcattggtcggtgtttggtcttgctttgtgactttgataataacatcgattcccatatgatgtttgttttcttcttccgtacacgaggaggaggatgaggatgattgctgaagactggcaggcatagcagctgccgccaggcacatgcatgccaggacgatatattgtttcataattgctattgattgagtactgttctttatgattctacttccttaccgtgcaataaattagaatatattttctacttttacgagaaattaattattgtatttattatttatgggtgaaaaacttactataaaaagtgggtgggtttggaattagtgatcagtttatgtatatcgcaactaccgggcatatggctatcgacatcgagaacattacccacatgataagagattgtatcagtttcgtagtcttgagtattggtattactatatagtatatagatgtcgcccactagagttactgtctccgaatgcggcatgatagtatcattctttgctttcgttaactgtttggaggaagaatctttgttattgcatttaatctcgaaattcagagtgcacacctttctcctgtaaagaaacctgaagtcgctaccttattaagaacggagaagtatccatcacgaaatacgggattacagtctttatgattcatagtaatagttagttccgacgttgagatggattcgctgagaccggtagtggtcgtccgagtacacgacgtgtcgttaactggatacaggttaatttccacatcgatatagttaaacgtatttctgggtacgggttcgcatttatctgcggaagagacggtgtgagaatatgttccgagaccacacggagaacagatgacgtctccggatactccgtatcctattccacattttgtttgggaaacacatgccttgcatccggatgatcctttgagaagacaataatatccgggagagcattcacagattctattgtgagtcgtgttacacgatcgcgtcttccgttacaacttagacaagcgggtaaatgattattgcgagatgtgaaggtacccgaaccacacggcgtacatcgtgtgttagtcttgctatcgcataatctggaagcgtatgttcccggacacaaattatggcgtttgtattcgttgtctttacactttccatcggatggtgcatgcggtgctatatctcttccgtttattattatacatgagagaaacaatatatacgagtataatacggacttcatgatttaataatgtagtaatcgttgtcttgttcctgtttcctacttctccaatcatatagatattttctttctatcatggataatatttgtaatggttctttccgtacaacatactgtttagatgatattgcgcataatttccggaggcaaatacgatagtctagattgaccgatggtagactctaatttattgagtgctttgtcgacgagtttacttttacgctccatcgatagatggcactgttctatgagatcgtcgtacatgggaaatgaaatgtgactgtctgaatgtatggctttaagatagctgtgataccgtatacaggtcggtgtcggagattcgaatctctttgaggcgacttatgtcacgatgatggaatctatcttatcgaatgatatatttttcataaatacacttttatagtcctcgtttaaacagaatttactatgtagttccgcgaatgactcgtcccttaataggcagtaggctagtatcttttttacgtagtaatcgtcgtagggagagacatcttgtagaacaacgatttcgttttgttttctcttctgtaactgcttttctggatggccgtattgattatcgagcgtgatactcgctccatattccaataaccgctttgcaaattgtatattattgacatcgaccgcgtaatatagtagagttatcgatcatatctatatcatccatgtacttgcttagtatatcaaatacatctatcagtatggtttcataacagtgatacccgcaattattaaatctcgataatatcagaccgtacatacatagacggccattgttcgatacgtgatttacagccgcgtgtccatattttccacgataaaccttacgacgtttacatcgacgagattattattaacaaagtagtcgtgtagaggatagttgttgtccgttatctaacatgcatcgaacgaccatatcgccgtaatgtaagtagtttatcagtatggcttgtacgatggattcatcctgttgtctaaatctctttagaatgttatcgatgatgtagtggttatattctctggaatcgtacgaagtaatactacgcattacgtcgacaagagtatgacgtctctcaataagaagattaacgatttccatgtctacattatatggggttactctaaatcgcttgtttagataatacgcctctaatatagggctgacgtcgtatactctacacgtgtccacatcctttattaataataatttaacaatctctatatctatggttgagaaagaccagtagtattggatgggtaaagatcctccttcgtctctgccatggatggaaacattgttatcgatcaaacatttaattacatccttggatagagattgagattctctatgagacgatatatagtaatgaagagagttcttacacatatcactgtcgtacatacaggtacgaaatacgtaaccggtgctgtaacattctgatttaagaagccatagcaatacttctggtctcggattaggcgtcgttacgtatatatccaccaatccgagaccattgattgcataattcgtattcttggacggacgtatccgtttatccacaattaggtattttagcagacgtaagtcgatattatccgaatacagatcgaaatcatttatattcgacttgagttcgttagaggaatttgaatagctggatatcagtagatgcacaatctgagattttacgtatctatgcttactgtatactcctagcggagttaatccttcgttgtttctacaaagtctctcgactccgcgagagaacaatcttaatgtctgtatcgcatttattggagacgtaacaatgtagcgcattgtttcctcgtctatctatatgttttgataagttgtgacacgtttcaatttctagttttatttttttgtacgtcacatcttcatccagtagacgacatagaatagtgcactctctaccacaataatccatagctattctggtgctaattattcctatttcacgaaggcaatcattcctcataagatgataaaaagtgtagtggagatttagtatttagcagtgcggatatgatccaagagggtgagatagtcgttctcgttcagaatctttcgcagcataagtagtatgtcgatatacttatcgttgaagactctttataaaagtctatttgtttatatttattgcggatagcagtatttccctataaaaagtatacgtcctgtggtgtctttaatcatgtacatgaatggatggtttatgtagaccttcgtacgatataccatcgaaaagttaatcgtaaatactcctgtaacggccgatgcttctgtatactcctcattaacatctataaacgtcgtatgtagaaatttttctacagtgatagtttcattacacatcttgctaaaatctgcataatatccgaatatattagtaagtcctaaattttctaaaatcggtaccagattatacggttctgtcatttccactttaaactttggcatatacaagtctatacttttagtagataacataccacaccattttttaaatttttcatctgttatatttttttctatgttatatataccttctatgtcgtccggtagtataattaccatactagagtttccctcgtatggaatatcgataatagagaatcctccgaataattcattaatatgtacatattgcaagttattctcggtacccaccatcatatcaacgctggtaactatattcttagaaatataaaacttgtctgtatatgtaagatgtttagaaaatggatatttccacattgctttaaaatggacggcgctaacaactgtcatacgagtattaatggatagcggactagtcaataaggaattaattttaccatttgtcattgtcttaacccattcgttgattagttcctttgtttggttagcattattaaagtttacagtttgaaaatcgtcttttattttttgtaggaaggaggcgtggaactcgatactatcgctaccgtatattttatttgcggtagctagtgtcgcacaatacggaatatctacctccatgtcatcattattgtcatcgggtgtattctcattcatattctctatatattttgatagttgttcagctgtagaaccagctgctccatgatttagaatagataaagtagataaaatggaaactggagaaatcaaaacattttcatcagggtgttttaagattagttctttaaagatatccatggtatagacctaacgataacgatatatatcataaataaataatgttaaatttcaatttatgtttgtaccccgtattcatacttaacaaattggtattgcgtacacaatcaatcatattacataccattaataatgcaagcataaaaaattgttagtagatgtttctaaatataggttccgtaagcaaagaatataagaatgaagcggtaatgataaaatcaatcgttatctaaaatgatcatactcatttattttattctattatattaacacatacatttttaacagcaacacattcaatattgtattgttatttttatattatttacacaattaacaatatattattagtttatattactgaattaataatataaaattcccaatcttgtcataaacacacactgagaaacagcataaacacagaatccatcaaaaatgttgataaattatctgatgttgttgttcgctgctatgataatcagatcattcgccgatagtggtaacgctatcgaaacgacattgccagaaattacaaacgctacaacagatattccagctatcagattatgcggtccagagggagatggatattgtttacacggtgactgtatccacgctagagatattgacggtatgtattgtagatgctctcatggttatacaggcattagatgtcagcatgtagtattagtagactatcaacgttcagaaaacccaaacactacaacgtcatatatcccatctcccggtattatgcttgtattagtaggcattattatgtgttgtctattatctgtttataggttcactcgacgaactaaactacctatacaagatatggttgtgccataatttttataaatttttttatgagtatttttacaaaaatgtataaagtgtatgtcttatgtatatttataaaaatgctaagtatgcgatgtatctatgttatttgtatttatctaaacaatacctctacctctagatattatacaaaaattttttatttcggcatattaaagtaaaatctagttaccttgaaaatgaatacagtgggtggttccgtatcaccagtaagaacataatagtcaaatacagtatccgattgagattttgcatacaatactagtctagaaagaaatttgtaatcatcttctgtgacgggagtccatatatctgtatcatcgtctagtttatcagtgtcccatgctatattcctgttatcatcattagttaatgaaaataactctcgtgcttcagaaaagtcaaatattgtatccatacatacatctccaaaactatcgcttatacgtttatctttaacgatacctatacctagatggttatttactaacagacattttccagatctattgactataactcctatagtttccacatcaaccaagtaatgatcatctattgttatataacaataacataactcttttccatttttatcagtatgtatatctatatcaacgtcgtcgttgtagtgaatagtagtcattgatctattatatgaaacggatatgtctagaacggcaattgttttacgtccagttaacactttcgttgatttaaagtctagagtctttgcaaacataatatccttatccgactttatatttcctgtagggtggtataattttattttgcctccacatatcggtgtttccaaatatattactagacaatattccatatagttattagttaagggtacccaattagaacacgtacgcttattatcatcatttggatcgtatttcataaaagttattgtgttatcgatgtcaacacattctacattttttaatcgtctatatagtatttttctgatattttctataatatcagaattgtcttccatcggaagttgtatactatcggaatcagttacatgtttaaataattctctgatgtcattccttatacaatcaaattcattattaaacagtttaatagtctgtagacctttatcgtcgtaaatatccattgtcttattagttacgcttatttttatgtgtttttacgttgctttattatattttataagaatgattgtttgacgaatcacgagaactattaagacacattattaggtatatattataaaaaagtttttgattacgatgttataagaggaaagaggacacattaacatcatacatcaattaactacattcttataacatcgtaatcaaaagaattgcaattttgatgtataacaactgtcaatgggttatggaattgtatattacatattatacggtatgttggtaacgacaaataccggtcggtaattgtctgccggtgtaatagaattatatatatctatctattacaccggccttgtatacataataataagttgtggtagtatgatctccatatttataatttaggactttgtattcagtatttttggaatcataaaaaataaaaaaaagttttactaatttaaaatttaaaaagtatttacatttttttcactgtttagtcgcggatatggaattcgatcctgccaaaatcaatacatcatctatagatcatgtaacaatattacaatacatagatgaaccaaatgatataagactaacagtatgcattatccgaaatattatatcaatatcacaaaaataaatacacatttggctaatcaatttcgggcttggaaaaaacgtatcgccggaagggactatatgactaacttatctagagatacaggaatacaacaatcaaaacttactgaaactatacgtaactgtcaaaaaaatagaaacatatatggtctatatatacactacaatttagttattaattggataaccgatgtgattatcaatcaatattaagagggttggtaaattggtacatagctaataatacctatactccaaatacacccaataatacaacaaccatttctgagttggatatcatcaaaatactaaataaatacgaggacgtgtatagagtaagtaaagaaaaagaatgtggaatttgctatgaagttgtttactcaaaacgatagatactttggtttattggattcgtgtactcatatattttgcataacatgcatcaatatatggcatagaacacgaagagaaaccggtgcgtcggataattgtcctatatgccgtacccgttttagaaacataacaatgagcaagttctataagctagttaactaataaataaaaagtttaatttgttgacgacgtatgtcgttattttttctcgtataaaagattaatttgattctaatataatctttagtattggataaatatcaattcaaattaattccattagattatatcataaataaaaatagtagcacacaactacttcagcaaacattctttttataaatgccatctagcgtagcgaggacacaagtgaacctataattatcaaatttattagtatcagtcacatgaaggactttacgtagagtgacgattccactatctgtggtacgaacggtttcatcttctttgatgccatcacccagatgttctataaacttggtatcctcgtccgatttcatatcctttgccaaccaatacatatagctaaactcaggcatatgttccacacatcctgaacaatgaaattctccagaagatgttacaatgtctagatttggacatttggtttcaaccgcgttaacatatgagtgaacacacccatacatgaaagcgatgagaaataggattctcatcttgccaaaatatcactagaaaaaatttatttatcagttttaaaggtataaaaaatacttattgttgctcgaatattttgtatttgatggtatacggaagattagaaatgtaggtattatcatcaactgattctatggttttatgtattctatcatgtttcactattgcgttggaaataatatcatatgcttccacatatattttattttgttttaactcataatactcacgtaattctggattattggcatatctatgaataattttagctccatgatcagtaaatattaatgagaacatagtattaccacctaccattatttttttcatctcattcaattcttaattgcaaagatctatataatcattatagcgttgacttatggactctggaatcttagacgatgtacagtcatctataatcatggcatatttaatacattgttttatagcatagtcgttatctacgatgttagatatttctctcaatgaatcaatcacacaatctaatgtaggtttatgacataatagcattttcagcagttcaatgtttttagattcgttgatggcaatggctatacatgtatatccgttatttgatctaatgttgacatctgaaccggattctagcagtaaagatactagagattgtttattatatctaacagccttgtgaagaagtgtttctcctcgtttgtcaatcatgttaatgtctttaagataaggtaggcaaatgtttatagtactaagaattgggcaagcataagacatgtcacaaagacccttttttgtatgtataagtgtaaaaattataacatccatagttggatttacataggtgtccaatcgggatctctccatcatcgagataattgatggcatctcccttccttttttagtagatatttcatcgtgtaagaatcaatattaatatttctaaagtatccgtgtatagcctctttatttaccacagctccatattccactagagggatatcgccgaatgtcatatactcaattagtatatgttggaggacatccgagttcattgttttcaatatcaaagagatggtttccttatcatttctccatagtggtacaatactacacattattccgtgcggctttccattttccaaaaacaatttgaccaaatctaaatctacatctttattgtatctataatcactatttagataatcagccataattcctcgagtgcaacatgttagatcgtctatatatgaataagcagtgttatctattcctttcattaacaatttaacgatgtctatatctatatgagatgacttaatataatattgaagagctgtacaatagtttttatctataaaagacggcttgattccgtgattaattagacatttaacaacttccggacgcacatatgctctcgtatccgactctgaatacagatgagagatgatatacagatgcaatacggtaccgcaatttcgtagttgataatcatcatacgcgtatcagtactcgtcctcataaagaacactgcagccattttctatgaacaaatcaataattttagaaacaggatcattgtcattacataattttctataactgaacgatggttttcacatttaacactcaagtcaaatccatgttctaccaacacctttatcaagtcaacgtctacatttttggatttcatatagctgaatatattaaagttatttatgttgctaaatccagtggcttctagtagagccatcgctatatccttattaactttaacatgtctactatttgtgtattcttctaatggggtaagctgtctccaatttttgcgtaatggattagtgccactgtctagtagtagtttgacgacctcgacattattacaatgctcattaaaaaggtatgcgtgtaaagcattattcttgaattggttcctggtatcattaggatctctgtctttcaacatctgtttaagttcatcaagagccacctcctcattttccaaatagtcaaacattttgactgaatgagctactgtgaactctatacacccacacaactaatgtcattaaatatcatgtcaaaaacttgtacaattattaataaaaataatttagtgtttaaattttaccagttccagattttacacctccgttaatacctccattaaccccactggacgatcctcctccccacattccaccgccaccagatgtataagttttagatcctttattactaccatcatgtccatggataaagacactccacatgccgccactaccccctttagaagacatattaataagacttaaggacaagtttaacaataaaattaatcacgagtaccctactaccaacctacactattatatgattatagtttctatttttacagtaccttgactaaagtttctagtcacaagagcaatactaccaacctacactattatatgattatagtttctatttttataggaacgcgtacgagaaaatcaaatgtctaatttctaacggtagtgttgataaacgattgttatccgcggatacctcctctatcatgtcgtctattttcttactttgttctattaacttattagcattatatattatttgattataaaacttatattgcttattagcccaatctgtaaatatcggattattaacatatcgtttctttgtaggtttatttaacatgtacatcactgtaagcatgtccttaccatttattttaatttgacgcatatccgcaatttctttttcgcagtcggttataaattctatatatgatggatacatgctacatgtgtacttataatcgactaatatgaagtacttgatacatattttcagtaacgatttattattaccacctatgaataagtacctgtgatcgtctaggtaatcaactgttttcttaatacattcgatggttggtaatttactcagaataatttccaatatcttaatatataattctgctatttctgggatatatttatctgccagtataacacaaatagtaatacatgtaaacccatattttgttattatattaatgtctgcgccattatctattaaccattctactaggctgacactatgcgactcaatacaatgataaagtatactacatccatgtttatctattttgtttatatcatcaatatacggcttacaaagttttagtatcgataacacatccaactcacgcatagagaaggtagggaataatggcataatatttattaggttatcatcattgtcattatctacaactaagtttccattttttaaaatatactcgacaactttaggatctctattgccaaatttttgaaaatatttatttatatgcttaaatctatataatgtagctccttcatcaatcatacatttaataacattgatgtatactgtatgataagatacatattctaacaatagatcttgtatagaatctgtatatcttttaagaattgtggatattaggatattattacataaactattacacaattctaaaatataaaacgtatcacggtcgaataatagttgatcaactatataattatcgattttgtgatttttcttcctaaactgtttacgtaaatagttagatagaatattcattagttcatgaccactatagttactatcgaataacgcgtcaaatatttcccgtttaatatcgcatttgtcaagataataatagagtgtggtatgttcacgataagtataataacgcatctctttttcgtgtgaaattaaatagtttattacgtccaaagatgtagcataaccatcttgtgacctagtaataatataataatagagaactgttttacccattctatcatcataatcagtggtgtagtcgtaatcgtaatcgtctaattcatcatcccaattataatattcaccagcacgtctaatctgttctattttgatcttgtatccatactgtatgttgctacatgtaggtattcctttatccaataatagtttaaacacatctacattgggatttgatgttgtagcgtatttttctacaatattaataccatttttgatactatttatttctatacctttcgaaattagtaatttcaataagtctatattgatgttatcagaacatagatattcgaatatatcaaaatcattgatatttttatagtcgactgacgacaataacaaaatcacaacatcgtttttgatattattatttttcttggtaacgtatgcctttaatggagtttcaccatcatactcatataatggatttgcaccactttctatcaatgattgtgcactgctggcatcgatgttaaatgttttacaactatcatagagtatcttatcgttaaccatgattggttgttgatgctatcgcattttttggtttctttcatttcagttatgtatggatttagcacgtttgggaagcatgagctcatatgatttcagtactgtagtgtcagtactattagtttcaataagatcaatctctagatctatagaatcaaaacacgataggtcagaagataatgaatatctgtaggcttcttgttgtactgtaacttctggttttgttagatggttgcatcgtgctttaacgtcaatggtacaaattttatcctcgctttgtgtatcatattcgtccctactataaaattgtatattcagattatcatgcgatgtgtatacgctaacggtatcaataaacggagcacaccatttagtcataaccgtaatccaaaaatttttaaagtatatcttaacgaaagaagttgtgtcattgtctacggtgtatggtactagatcctcataagtgtatatatctagagtaatgtttaatttattaaatggttgataatatggatcctcgtgacaatttccgaagatggaaataagacataaacacgcaataaatctaattgcggacatggttactccttaaaaaaatacgaataatcaccttggctatttagtaagtgtcatttaacactatactcatattaatccatggactcataatctctatacgggattaacggatgttctatatacggggatgagtagttctcttctttaactttatactttttactaatcatatttagactgatgtatgggtaatagtgtttgaagagctcgttctcatcatcagaataaatcaatatctctgtttttttgttatacagatgtattacagcctcatatattacgtaatagaacgtgtcatctaccttattaactttcaccgcatagttgtttgcaaatacggttaatcctttgacctcgtcgatttccgaccaatctgggcgtataatgaatctaaactttaattgcttgtaatcattcgaaataatttttagtttgcatccgtagttatcccctttatgtaactgtaaatttctcaacgcgatatctccattaataatgatgtcgaattcgtgctgtatacccatactgaatggatgaacgaataccgacggcgttaatagtaatttactttttcatctttacatattgggtactagttttactatcataagtttataaattccacaagctactatggaataagccaaccatcttagtataccacacatgtcttaaagtttattaattaattacatgttgttttatatatatcgctacgaatttaaagagaaattagtttaggaagaaaaattatctatctacatcatcacgtctctgtattctacgatagagtgctactttaagatgcgacagatccgtgtcatcaaatatatactccattaaaatgattattccggcagcgaacttgatattggatatatcacaacctttgttaatatctacgacaatagacagcagtcccatggttccataaacagtgagtttatctttctttgaagagatattttgtagagatcttataaaactgtcgaatgacatcgcatttatatctttagctaaatcgtatatgttaccatcgtaatatctaaccgcgtctatcttaaacgtttccatcgctttaaagacgtttccgatagatggtctcatttcatcagtcatactgagccaacaaatataatcgtgtataacatctttgatagaatcagactctaaagaaaacgaatcggctttattatacgcattcatgataaacttaatgaaaaatgtttttcgttgtttaagttggatgaatagtatgtcttaataattgttattatttcattaattaatatttagtaacgagtacactctataaaaacgagaatgacataactaatcataactagttatcaaagtgtctaggacgcgtaattttcatatggtatagatcctgtaagcattgtctgtattctggagctattttctctatcgcattagtgagttcagaatatgttataaatttaaatcgaataacgaacataactttagtaaagtcgtctatattaactcttttattttctagccatcgtaataccatgtttaagatagtatattctctagttactacgatctcatcgttgtctagaatatcacatactgaatctacatccaattttagaaattggtctgtgttacatatctcttctatattattgttgatgtattgtcgtagaaaactattacgtagaccattttctttataaaacgaatatatagtactccaattatctttaccgatatatttgcacacataatccattctctcaatcactacatctttaagattttcgttgttaagatatttggctaaactatataattctattagatcatcaacagaatcagtatatatttttctagatccaaagacgaactctttggcgtcctctataatattcccagaaaagatattttcgtgttttagtttatcgagatctgatctgttcatatacgccatgattgtacggtacgttatgataaccgcataaaataaaaatccattttcatttttaaccaatactattcataattgagattgatgtaatactttgttactttgaacgtaaagacagtacacggatccgtatctccaacaagcacgtagtaatcaaatttggtgttgttaaacttcgcaatattcatcaatttagatagaaacttatactcatcatctgttttaggaatccatgtattattaccactttccaacttatcattatcccaggctatgtttcgtccatcatcgttgcgcagagtgaataattcttttgtattcggtagttcaaatatatgatccatgcatagatcggcaaagctattgtagatgtgatttttcctaaatctaatataaaactcgtttactagcaaacactttcctgatttatcgaccaagacacatatggtttctaaatctatcaagtggtggggatccatagttatgacgcagtaacatatattattacattcttgactgtcgctaatatctaaatatttattgttatcgtattggattctgcatatagatggcttgtatgtcaaagatatagaacacataaccaatttatagtcgcgctttacattctcgaatctaaagttaagagatttagaaaacattatatcctcggatgatgttatcactgtttctggagtaggatatattaaagtctttacagatttcgtccgattcaaataaatcactaaataatatcccacattatcatctgttagagtagtatcattaaatctattatattttatgaaagatatatcactgctcacctctatatttcgtacatttttaaactgtttgtataatatctctctgatacaatcagatatatctattgtgtcggtagacgataccgttacatttgaattaatggtgttccattttacaacttttaacaagttgaccaattcatttctaatagtatcaaactctccatgattaaatattttaatagtatccattttatatcactacggacacaaagtagctgacataaaccattgtataatttttatgttttatgtttattagcgtacacattttggaagttccggcttccatgtatttcctggagagcaagtagatgatgaggaaccagatagtttatatccgtacttgcacttaaagtctacattgtcgttgtatgagtatgatcttttaaacccgctagacaagtatccgtttgatattgtaggatgtggacatttaacaatctgacacgtgggtggatcggaccattctcctcctgaacacaggacactagagttaccaatcaacgaatatccactattgcaactataagttacaacgctcccatcggtataaaaatcctcgtatccgttatgtcttccgttggatatagatggaggggattggcatttaacagattcacaaataggtgcctcgggattccataccatagatccagtagatcctaattcacaatacgatttagattcaccgatcaactgatatccgctattacaagagtacgttatactagagccaaagtctactccaccaatatcaagttggccattatcgatatctcgaggcgatgggcatctccgtttaatacattgattaaagagtgtccatccagtacctgtacatttagcatatataggtcccattttttgctttctgtatccaggtagacatagatattctatagtgtctcctatgttgtaattagcattagcatcagtctccacactattcttaaatttcatattaatgggtcgtgacggaatagtacagcatgatagaacgcatcctattcccaacaatgtcaggaacgtcacgctctccaccttcatatttatttatccgtaaaaatgttatcctggacatcgtacaaataataaaaagcccatatatgttcgctattgtagaaattgtttttcacagttgctcaaaaacgatggcagtgacttatgagttacgttacactttggagtctcatctttagtaaacatatcataatattcgatattacgagttgacatatcgaacaaattccaagtatttgattttggataatattcgtattttgcatctgctataattaagatataatcaccgcaagaacacacgaacatctttcctacatggttaaagtacatgtacaattctatccatttgtcttccttaactatatatttgtatagataattacgagtctcgtgagtaattccagtaattacatagatgtcgccgtcgtactctacagcataaactatactatgatgtctaggcatgggagacttttttatccaacgatttttagtgaaacattccacatcgtttaatactacatatttctcatacgtggtataaactccacccattacatatatatcatcgtttacgaataccgacgcgcctgaatatctaggagtaattaagtttggaagtcttatccatttcgaagtgccgtgtttcaaatattctgccacacccgttgaaatagaaaattctaatcctcctattacatataactttccatcgttaacacaagtactaacttctgattttaacgacgacatattagtaaccgttttccattttttcgttttaagatctacccgcgatacggaataaacatgtctattgttaatcatgccgccaataatgtatagacaattatgtaaaacatttgcattatagaattgtctatctgtattaccgactatcgtccaatattctgttctaggagagtaatgggttattgtggatatataatcagagtttttaatgactactatattatgttttataccatttcgtgtcactggctttgtagatttggatatagttaatcccaacaatgatatagcattgcgcatagtattagtcataaacttgggatgtaaaatgttgatgatatctacatcgtttggatttttatgtatccactttaataatatcatagctgtaacatcctcatgatttacgttaacgtcttcgtgggataagatagttgtcagttcatcctttgataattttccaaattctggatcggatgtcaccgcagtaatattgttgattatttctgacatcgacgcattatatagttttttaattccatatcttttagaaaagttaaacatccttatacaatttgtgaaattaatattatgaatcatagtttttacacatagatctactacaggcggaacatcaattattatggcagcaactagtatcatttctacattgtttatggtgatgtttatcttcttccagcgcatatagtctaatagcgattcaaacgcgtgatagtttataccattcaatataatcgcttcatcctttagatggtgatcctgaatgcgtttaaaaaaattatacggagacgccgtaataatttccttattcacttgtataatttccccattgatagaaaatattacgctttccattcttaaagtactataagtaattatagtataatgtaaacgtttatatattcaatatttttataaaaatcattttgacattaattcctttttaaatttccgtctatcatctatagaaacgtattctatgaatttataaaatgcttttacgtgtcctatcgtaggcgatagaaccgctaaaaagcctatcgaatttctacaaaagaatctgttatatggtatagggagagtataaaacattaaatgtccgtacttattaaagtattcagtagccaatcctaactctttcgaatacttattaatggctcttgttctgtacgaatctatttttttgaacaacggacctagtggtatatcttgttctatgtatctaaaataatgtctgactagatccgttagtttaatatccgcagtcatcttgtctagaatggcaaatctaactgcgggtttaggctttagtttagtttctatatctacatctatgtctttatctaacaccaaaaatataatagctaatattttattacaatcatccggatattcttctacgatctcactaactaatgtttctttggttatactagtatagtcactatcggacaaataaagaaaatcagatgatcgatgaataatacatttaaattcatcatctgtaagatttttgagatgtctcattagaatattattagggttagtactcattatcattcggcagctattacttattttattatttttcaccatatagatcaatcattagatcatcaaaatatgtttcaatcatcctaaagagtatggtgaatgactcttcccatctaatttctgaacgttcaccaatgtctctagccactttggcactaatagcgatcattcgcttagcgtcttctatattattaactggttgatttaatctatctagcaatggaccgtcggacagcgtcattctcatgttcttaatcaatgtacatacatcgccgtcatctaccaattcatccaacaacataagctttttaaaatcatcattataataggtttgatcgttgtcatttctccaaagaatatatctaataagtagagtcctcatgcttagttaacaactattttttatgttaaatcaattagtacaccgctatgtttaatacttattcatattttagtttttaggattgagaatcaatacaaaaattaatgcatcattaattttagaaatacttagtttccacgtagtcaatgaaacatttgaactcatcgtacaggacgttctcgtacaggacgtaactataaaccggtttatatttgttcaagatagatacaaatccgataactttttttacgaattctacgggatccactttaaaagtgtcataccgggttctttttatttttttaaacagatcaatggtgtgatgttgattaggtcttttacgaatttgatatagaatagcgtttacatattctccataatggtcaatcgccatttgttcgtatgtcataaattctttaattatatgacactgtgtattatttagttcatccttgttcattgttaggaatctatccaaaatggcaattatactagaactataggtgcgttgtatacacatattgatgtgtctgtttatacaatccatgatatttggatccatgctactaccttcgggtaaaattgtagcatcatataccatttctagtactttaggttcattattatccattgcagaggacgtcatgatcgaatcataaaaaaatatattatttttatgttattttgttaaaaataatcatcgaatacttcgtaagatactccttcatgaacataatcagttacaaaacgtttatatgaagtaaagtatctacgatttttacaaaagtccggatgcataagtacaaagtacgcgataaacggaataataatagatttatctagtctatctttttctatagctttcatagttagatacatggtctcagaagtaggattatgtaacatcagcttcgataaaatgactgggttatttagtcttacacattcgctcatacatgtatgaccgttaactacagagtctacactaaaatgattgaacaatagatagtctaccattgtttcgtattcagatagtacagcgtagtacatggcatcttcacaaattatatcattgtctaatagatatttgacgcatcttatggatcccacttcaacagccatcttaaaatcatattgctttcctttatcattaataatttctagaacatcatctctatcataaaagatacaaatattaactgtttgatccgtaataacattgctagtcaatagcaatttgttaataagatgcgctgggctcaatgtcttaataagaagtgtaagaggactatctccgaatttgttttgtttattaacatccgttgatggaagtaaaagatctataatgtctacattcttgactgttttagagcatacaatatggagaggtgtatttccatcatgatctggttttgagggactaattcctagtttcatcatccatgagattgtagaagcttttggattgtctgacataagatgtctatgaatatgatttttgccaaatttatccactatcctggcttcgaatccgatggacattatttttttaaacactctttctgaaggatctgtacacgccaacaacggaccacatccttcttcatcaaccgagttgttaatcttggctccatactgtaccaataaatttattctctctatgacttcatcatctgttcccgagagataatatagaggtgttttatgctgtttatcacacgcgtttggatctgcgccgtgcgtcagcagcatcgcgactattctattattattaattttagaagctatatgcaatggataatttccatcatcatccgtctcatttggagagtatcctctatgaagaagttcttcgacaaatcgttcatctagtcctttaattccacaatacgcatgtagaatgtgataattatttccagaaggttcgatagcttgtagcatattcctaaatacatctaaatttttactattatatttggcataaagagatagataatactcggccgacataatgttgtccattgtagtataaaaattaatatttctatttctatttctgtatatttgcaacaatttactctctataacaaatatcataacttagtttttttatgtcaagaaggcactggtttagttcatctataaatgtcacgccataactaccacgcatgccatactcagaattatgataaagatatttatccttggggtgtaggtaatggggattaatctttgttggatcagtctctaagttaacacatgtcacacatgatccatttatagttatatcacacgatgatgatttatgaattgattccggaagatcgctatcgtattttgtggttccacaattcatttccatacatgttattgtcacactaatattatgatgaactttatctagccgctgagtggtaaacaacagaacagatagtttattatctttaccaacaccctcagccgctgccacaaatctctgatccgtatccatgatggtcatgtttatttctagtccgtatccagtcaacactatgttagcatttctgtcgatatagctttcactcatatgacactcaccaataatagtagaattaatgtcgtaatttacaccaatagtgagttcggcggcaaagtaccaataccggtaatcttgtcgaggaggacatatagtattcttgtattctaccgaatacccgagagatgcgatacaaaagagcaagactaatttgtaaaccatcttactcaaaatatgtaacaatagtacgatgcaatgagtaagacaataggaaatctatcttatatacacataattattctatcaattttaccaattagttagtgtaatgttaacaaaaatgtgggagaatctaattagtttttctttacacaattgacgtacatgagtctgagttccttgtttttgctaattatttcatccaatttattattcttgacgatatcgagatcttttgtataggagtcaaacttgtattcaacatgcttttctataatcattttagctatttcggcatcatccaatagtacattttccagattagcagaatagatattaatgtcgtatttgaacagagcctgtaacatctcaatgtctttattatctatagccaatttaatgtccggaatgaagagaagggaattattggtgtttgtcgacgtcatatagtcgagcaagagaatcatcatatccacgtgtccattttttatagtgatgtgaatacaactaaggagaatagccagatcaaaagtagatggtatctctgaaagaaagtaggaaacaatacttacatcattaagcatgacggcatgataaaatgaagttttccatccagttttcccatagaacatcagtctccaatttttcttaacaaacagttttaccgtttgcatgttaccactatcaaccgcataatacaatgcggtgtttcccttgtcatcaaattgtgaatcatccagtccactgaatagcaaaatctttactattttggtatcttccaatgtggctgcctgatgtaatggaaattcattctctagaagatttttcaatgctccagcgttcaacaacgtacatactagacgcacgttattatcagctattgcataatacaaggcactatgtccatggacatccgccttaaatgtatctttactagagagaaagcttttcagctgcttagacttccaagtattaattcgtgacagatccatgtctgaaacgagacgctaattagtgtatattttttcattttttataattttgtcatattgcaccagaattaataatatctttaatagatctgattagtagatacatggctatcgcaaaacaacatatacacatttaataaaaataatatttattaagaaaattcagatttcacgtacccatcaatataaataaaataatgattccttacaccgtacccatattaaggagattccaccttacccataaacaatataaatccagtaatatcatgtctgatgatgaacacaaatggtgtattaaattccagtttttcaggagatgatctcgccgtagctaccataatagtagatgcctctgctacagttccttgttcgtcgacatctatctttgcattctgaaacattttataaatatataatgggtccctagtcatatgtttaaacgacgcattatctggattaaacatactaggagccatcatttcggctatcgacttaatatccctcttattttcgatagaaaatttagggagtttaagattgtacactttattccctaattgagacgaccaatagtctaattttgcagccgtgatagaatctgtgaaatgggtcatattatcacctattgccaggtacatactaatattagcatccttatacggaaggcgtaccatgtcatattctttgtcatcgattgtgattgtatttccttgcaatttagtaactacgttcatcatgggaaccgttttcgtaccgtacttattagtaaaactagcattgcgtgttttagtgatatcaaacggatattgccatatacctttaaaatatatagtattaatgattgcccatagagtattattgtcgagcatattagaatctactacattagacataccggatctacgttctactatagaattaattttattaaccgcatctcgtctaaagtttaatctatataggccgaatctatgatattgttgataatacgacggtttaatgcacacagtattatctacgaaactttgataagttagatcagtgtacgtatatttagatgttttcagcttagctaatcctgatattaattctgtaaatgctggacccagatctctttttctcaaatccatagtcttcaataattctattctagtattacctgatgcaggcaatagcgacataaacatagaaaacgaataaccaaacggtgagaagacaatattatcatcttgaatatttttatacgctactataccggcattggtaaatccttgtagacgataggcggacgctgaacacgctaacgatagtatcaataacgcaatcatgattttatggtattaataattaaccttatttttatgttcggtataaaaaaattattgatgtctacacatccttttgtaattgacatctatatatccttttgtataatcaactctaatcactttaacttttacagttttccctaccagtttatccctatattcaacatatctatccatatgcatcttaacactctctgccaagatagcttcagagtgaggatagtcaaaaagataaatatatagagcataatcattctcgtatactctgccctttattacatcacccgcattgggcaacgaataacaaaatgcaagcatcttgttaacgggctcgtaaattgggataaaaattatgtttttattgtcttatatctattttattcaagagaatattcaggaatttctttttccggttgtatctcgtcgcagtatatatcatttgtacattgtttcatattttttaatagtttacaccttttagtaggactagtatcgtacaattcatagctgtattttgaattccaatcacgcataaaaatatcttccaattgttgacgaagacctaatccatcatccggtgtaatattaatagatgctccacatgtatccgtaaagtaatttcctgtccaatttgaggtacctatataggccgttttatcggttaccatatatttggcatggtttaccctagaatacggaatgggaggatcagcatctggtacaataaatagctttacttctatatttatgtttttagattttagcatagcgatagatcttaaaaagtttctcatgataaacgaagatcgttgccagcaactaatcaatagcttaacggatacttgtctgtctatagcggatcttcttaattcatcttctatataaggccaaaacaaaattttacccgccttcgaataaataatagggataaagttcataacagatacataaacgaatttactcgcatttctaatacatgacaataaagcggttaaatcattggttctttccatagtacatagttgttgcggtgcagaagcaataaatacagagtgtggaacgccgcttacgttaatactaagaggatgatctgtattataatacgacggataaaagtttttccaattatatggtagattgttaactccaagataccagtatacctcaaaaatttgagtgagatccgctgccaagttcctattattgaagatcgcaatacccaattccttgacctgagttagtgatctccaatccatgttagcgcttcctaaataaatatgtgtattatcagatatccaaaattttgtatgaagaactcctcctaggatatttgtaatatctatgtatcgtacttcaactccggccatttgtagtctttcaacatcctttaatggtttgttagatttattaacggctactctaactcgtactcctcttttgggtaattgtacaatctcgtttaatattatcgtgccgaaattcgtacccacttcatccgataaactccaataaaaagatgatatatctagtgtttttgtggtattggatagaatttccctccacatgttaaatgtagacaaatatactttatcaaattgcatacctataggaatagtttctgtaatcactgcgattgtattatccggattcattttatttgttaaaagaataatcctatatcacttcactctattaaaaatccaagtttctatttctttcatgactgattttttaacttcatccgtttccttatgaagatgatgtttggcaccttcataaatttttatttctctattacaatttgcatgttgcatgaaataatatgcacctaaaacatcgctaatcttattgtttgttccctggagtatgagagtcggggggtgttaatcttggaaattatttttctaaccttgttggtagccttcaagacctgactagcaaatccagccttaattttttcatgattgactaatgggtcgtattggtatttataaactttatccatatctctagatactgattctggacatagctttccgactggcgcatttggtgtgatggttcccataagtttggcagctagcagattcagtcttgaaacagcatctgcattaactagaggagacattagaatcattgctgtaaacaagtttggattatcgtaagaggctagctcccatggaatgacccaataagtagatttaatagttaccacgtgctgtaccaaagtcatcaatcatcattttttcaccattacttcttccatgtccaatatgatcatgtgagaatactaaaattcctaacgatgatatgttttcagctagttcgtcataacgtccagaatgtttaccagctccatgacttatgaatactaatgccttaggatatgtaataggtttccaatatttacaatatatgtaatcattgtccagattgaacatacagtttgcactcatgattcacgttatataactatcaatattaacagttcgtttgatgatcatattatttttatgttttattgataattgtaaaaacatacaattaaatcaatatagaggaaggagacggctactgtcttttgtaagatagtcatggcgactaaattagattatgaggatgctgttttttactttgtggatgatgataaaatatgtagtcgcgactccatcatcgatctaatagatgaatatattacgtggagaaatcatgttatagtgtttaacaaagatattaccagttgtggaagactgtacaaggaattgatgaagttcgatgatgtcgctatacggtactatggtattgataaaattaatgagattgtcgaagctatgagcgaaggagaccactacatcaattttacaaaagtccatgatcaggaaagtttattcgctaccataggaatatgtgctaaaatcactgaacattggggatacaaaaagatttcagaatctagattccaatcattgggaaacattacagatttgatgaccgacgataatataaacatcttgatactttttctagaaaaaaaattgaattgatgatataggggtcttcataacgcataattattacgttagcattctatatccgtgttaaaaaaaattatcctatcatgtatttgagagttttatatgtagcaaacatgatagctgtgatgccaataagctttagatattcacgcgtgctagtgttagggatggtattatctggtggtgaaatgtccgttatataatctacaaaacaatcatcgcatatagtatgcgatagtagagtaaacatttttatagtttttactggattcatacatcgtctacccaattcggttataaatgaaattgtcgccaatcttacacccaaccccttgttatccattagcatagtattaacttcgttatttatgtcataaactgtaaatgattttgtagatgccatatcatacatgatattcatgtccctattataatcattactaactttatcacaatatatgttgataatatctatatatgatctagtctttgtgggcaactgtctatacaagtcgtctaaacgttgtttactcatatagtatcgaacagccatcattacatggtcccgttccgttgatagataatcgagtatgttagtggacttgtcaaatctatataccatattttctggaagtggatatacatagtcgtgatcaacattattgctagcctcatcttctatatcctgtactataccattatctatatcatctacataatctatgatattattacacataaacatcgacaacatactattgtttattatctaagtcctgttgatccaaacccttgatctcctctatttgtactatctagagattgtacttcttccagttctggataatatatacgttgatagattagctgagctattctatctccagtatttacattaaacgtacattttccattattaataagaatgactcctatgtttcccctataatcttcgtctattacaccacctcctatatcaatgccttttagtgacagaccagacctaggagctattctaccatagcagaacttaggcatggacatactaatatctgtcttaattaactgtctttctcctggagggatagtataatcgtaagcgctatacaaatcatatccggcagcacccggcgattgcctagtaggagatttagctctgttagtttccttaacaaatctaactggtgagttaatattcatgttgaacataaaactaatattttatttcaaaattatttaccatcccatatattccatgaataagtgtgatgattgtacacttctatagtatctatatacgatccacgataaaatcctcctatcaatagcagtttattatccactatgatcaattctggattatccctcggataaataggatcatctatcagagtccatgtattgctggattcacaataaaattccgcatttctaccaaccaagaataaccttctaccgaacactaacgcgcatgatttataatgaggataataagtggatggtccaaactgccactgatcatgattgggtagcaaatattctgtagttgtatcagtttcagaatgtcctcccattacgtatataacattgtttatggatgccactgctggattacatctaggtttcagaagactcggcatattaacccaagcagcatccccgtggaaccaacgctcaacagatgtgggatttggtagacctcctactacgtataatttattgttagcgggtatcccgctagcatacagtctggggctattcatcggaggaattggaatccaattgtttgatatataatttacagctatagcattgttatgtatttcattgttcatccatccaccgatgagatatactacttctccaacatgagtacttgtacacatatggaatatatctataatttgatccatgttcataggatactctatgaatggatacttgtatgatttgcgtggttgtttatcacaatgaaatattttggtacagtctagtatccattttacattatttatacctctgggagaaagataatttgacctgattacatttttgataaggagtagcagatttcctaatttatttcttcgcctcatataccacttaatgacaaaatcaactacataatcctcatctggaacatttagttcatcgctttctagaataagtttcatagatagataatcaaaattgtctatgatgtcatcttccagttccaaaaagtgtttggcaataaagtttttagtatgacataagagattggatagtccgtattctatacccatcatgtaacactcgacacaatattcctttctaaaatctcgtaagataaagtttatacaagtgtagatgataaattctacagaggttaatatagaagcacgtaataaattgacgacgttatgactatctatatatacctttccagtatatgagtaaataactatagaagttaaactgtgaatgtcaaggtctagacaaacccttgtaactggatctttatttttcgtgtatttttgacgtaaatgtgtgcgaaagtaaggagataactttttcaatatcgtagaattgactattatattgcctcctatggcatcaataattgttttgaatttcttagtcatagacaatgctaatatattcttacagtacacagtattgacaaatatcggcatttatgtttctttaaaagtcaacatctagagaaaaatgattatctttttgagacataactcccattttttggtattcacccacacgtttttcgaaaaaattagtttttccttccaatgatatattttccatgaaatcaaacggattggtaacattataaatttttttaaatcccaattcagaaatcaatctatccgcgacgaattctatatatgttttcatcatttcacaattcattcctataagtttaactggaagagccgcagtaagaaattcttgttcaatggatactgcatctgttataatagatctaacggtttcttcactcggtggatgcaataaatgtttaaacatcaaacatgcgaaatcgcagtgcagaccctcgtctctactaattagttcgttggaaaacgtgagtccgggcattaggccacgctttttaagccaaaatatggaagcgaatgatccagaaaagaaaattccttctactgcagcaaaggcaataagtctctctccataaccggcgctgtcatgtatccacttttgagcccaatcggccttcttttttacacaaggcatcgtttctatggcattaaagagatagtttttttcattactatctttaacataagtatcgatcaaaagactatacatttccgaatgaatgttttcaatggccatctgaaatccgtagaaacatctagcctcggtaatctgtacttctgtacaaaatcgttccgccaaattttcattcactattccgtcactggctgcaaaaaacgccaatacatgttttataaaatatttttcgtctggtgttagtttattccaatcattgatatctttagatatatctacttcttccactgtccaaaatgatgcctctgcctttttatacatgttccagatgtcatgatattggattgggaaaataacaaatctatttggatttggtgcaaggatgggttccataactaaattaacaataacaataaattttttttcagttatctatatgcctgtacttggattttttgtacatcgatatcgccgcaatcactacaataattacaagtattattgatagcattgttattagtactatcataattaaattatctacattcatgggtgctgaataatcgttattatcatcattatcattttgtaattgtgacatcatactagataaatcgtttgcgagattgttgtgggaagcgggcatggaggatgcattatcattattatttaacgccttccatttggattcacaaatgttacgcacattcaacattttatggaaactataattttgtgaaaacaaataacaagaaaactcgtcatcgttcaaatttttaacgatagtaaaccgattaaacgtcgagctaatttctaacgctagcgactctgttggatatgggtttccagatatatatcttttcagttcccctacgtatctataatcatctgtaggaaatggaagatatttccatttatctactgttcctaatatcatatgtggtggtgtagtagaaccattaagcgcgaaagatgttatttcgcatcgtattttaacttcgcaataatttctggttagataacgcactctaccagtcaagtcaatgatattagcctttacagatatattcatagtagtcgtaacgatgactccatcttttagatgcgatactcctttgtatgtaccagaatcttcgtacctcaaactcgatatatttaaacaagttaatgagatattaacgcgttttatgaatgatgatatataaccagaagttttatcctcggtggctagcgctataaccttatcattataataccaactagtgtgattaatatgtgacacgtcagtgtgggtacaaatatgtacattatcgtctacgtcgtattcgatacatccgcatacagccaacaaatataaaatgacaaatactctaacgccgttcgtacccatcttgatgcggtttaataaatgttttgatttcaatttattgtaaaaaaagattcggttttatactgttcgatattctcattgcttatattttcatctatcatctccacacagtcaaatccgtggttagcatgcacctcatcaaccggtaaaagactatcggactcttctatcattataactctagaatatttaatttggtcattattaatcaagtcaattatcttatttttaacaaacgtgagtattttactcattttttataaaaacttttagaaatatacagactctatcgtgtgtctatatcttctttttatatccaatgtatttatgtctgatttttcttcatttatcatatataatggtccaaattctacacgtgcttcggattcatccagatcattaaggttcttataattgtaacatccttctcttccctcttctacatcttccttcttattcttattcttagcgtcacagaatctaccacagcaggatcccatgacgagcgtcatattaaactaatccattttcaattataatatatgattagtaatgaccattaaaataaaaaatattcttcataaccggcaagaaagtgaaaagttcacattgaaactatgtcagtagtatacatcatgaaatgatgatatatatatactctattttggtggaggattatatgatataattcgtggataatcatttttaagacacatttctttattcgtaaatcttttcacgttaaatgagtgtccatattttgcaatttcttcatatgatggcggtgtacgtggacgaggctgctcctgttcttgttgtggtcgccgactgtcgtgtctgcgtttagatccctccattatcgcgattgcgtagatggagtactattttataccttgtaattaaatttttttattaattaaacgtataaaaacgttccgtatctgtatttaagagccagatttcgtctaatagaacaaatagctacagtaaaaataactagaataattgctacacccactagaaaccacggatcgtaatacggcaatcggttttcgataataggtggaacgtatattttatttaaggacttaacaattgtctgtaaaccacaatttgcttccgcggatcctgtattaactatctgtaaaagcatatgttgaccgggcggagccgaacattctccgatatctaatttctgtatatctataatattattaacctccgcatacgcattacagttcttttctagcttggataccgcactaggtacatcgtctagatctattcctatttcctcagcgatagctcttctatccttttccggaagcaatgaaatcacttcaataaatgattcaaccatgagtgtgaaactaagtcgagaattactcatgcatttgttagttattcggagcgcgcaatttttaaactgtcctataacctctcctatatgaatagcacaagtgacattagtagggatagaatgttgagctaatttttgtaaataactatctataaaaagattatacaaagttttaaactctttagtttccgccatttatccagtctgagaaaatgtctctcataataaatttttccaagaaactaattgggtgaagaatggaaacctttaatctatatttatcacagtctgttttggtacacatgatgaattcttccaatgccgtactaaattcgatatctttttcgatttctggatatgtttttaataaagtatgaacaaagaaatggaaatcgtaataccagttatgtttaactttgaaattgttttttattttcttgttaatgattccagccacttgggaaaagtcaaagtcgtttaatgccgatttaatacgttcattaaaaacaaactttttatcctttagatgaattattattggttcattggaatcaaaaagtaagatattatcgggtttaagatctgcgtgtaaaaagttgtcgcaacagggtagttcgtagattttaatgtataacagagccatctgtaaaaagataaactttatgtattgtaccaaagatttaaatcctaatttgatagctaactcggtatctactttatctgccgaatacagtgctaggggaaaaattataatgtttcctctttcatattcgtagttagttctcttttcatgttcgaaaaagtgaaacatgcggttaaaatagtttataacattaatattactgttaataactgccggataaaagtgggatagtaatttcacgaatttgatactgtcctttctctcgttaaacgcctttaaaaaaactttagaagaatatctcaatgagagttcctgaccatccatagtttgtatcaataatagcaacatatgaagaacacgtttatacagagtatgtaaaaatgttaatttatagtttaatcccatggcccacgcacacacgattaattttttttcatctccctttagattgttgtatagaaatttgggtactgtgaactccgccgtagtttccatgggactatataattttgtggcctcgaatacaaattttactacatagttatctatcttaaagactataccatatcctcctgtagatatgtgataaaaatcgtcgtttataggataaaatcgtttatccttttgttggaaaaaggatgaattaatgtaatcattctcttctatctttagtagtgtttccttattaaaattcttaaaataatttaacaatctaactgacggagcccaattttggtgtaaatctaattgggacattatattgttaaaatacaaacagtctcctaatataacagtatctgataatctatggggagacatccattgatattcaggggatgaatcattggcaacacccatttattgtacaaaaagccccaatttacaaacgaaagtccaggtttgatagagacaaacaattaactattttgtctctgtttttaacacctccacagtttttaatttctttagtaatgaaattattcacaatatcagtatcttctttatctaccagagattttactaacttgataaccttggctgtctcattcaatagggtagtaatatttgtatgtgtgatattgatatctttttgaattgtttcttttagaagtgattctttgatggtgccagcatacgaattacaataatgcagaaactcggttaacatgcaggaattatagtaagccaattccaattgttgcctgtgttgtattagagtgtcaatatgagcaatggtgtccttgcgtttctctgatagaatgcgagcagcgattttggcgttatcatttgacgatatttctggaatgacgaatcctgtttctactaactttttggtaggacaaagtgaaacaatcaagaagatagcttctcctcctatttgtggaagaaattgaactcctctagatgatctactgacgatagtatctccttgacagatattggaccgaattacagaagtacctggaatgtaaagccctgaaaccccctcattttttaagcagattgttgccgtaaatcctgcactatgcccaagatagagagctcctttggtgaatccatctctatgtttcagtttaaccaagaaacagtcagctggtctaaaatttccatctctatctaatacagcatctaacttgatgtcaggaactatgaccggtttaatgttatatgtaacattgagtaaatccttaagttcataatcatcactgtcatcagttatgtacgatccaaacaatgtttctaccggcatagtggatacgaagatgctatccatcagaatgtttccctgattagtattttctatatagctattcttctttaaacgattttccaaatcagtaactatgttcatttttttaggagtaggacgcctagccagtatggaagaggattttctagatcctctcttcaacatctttgatctcgatggaatgcaaaaccccatagtgaaacaaccaacgataaaaataatattgtttttcactttttataattttaccatctgactcatggattcattaatatctttataagagctactaacgtataattctttataactgaactgagatatatacaccggatctatggtttccataattgagtaaatgaatgctcggcaataactaatggcaaatgtatagaacaacgaaattatactagagttgttaaagttaatattttctatgagctgttccaataaattatttgttgtgactgcgttcaagtcataaatcatcttgatactatccagtaaaccgtttttaagttctggaatattatcatcccattgtaaagcccctaattcgactatcgaatatcctgctctgatagcagtttcaatatcgacggacgtcaatactgtaataaaggtggtagtattgtcatcatcgtgataaactacgggaatatggtcgttagtaggtacggtaactttacacaacgcgatatataactttccttttgtaccatttttaacgtagttgggacgtcctgcagggtattgttttgaagaaatgatatcgagaacagatttgatacgatatttgttggattcctgattattcactataatataatctagacagatagatgattcgataaatagagaaggtatatcgttggtaggataatacatccccattccagtattctcggatactctattgatgacactagttaagaacatgtcttctattctagaaaacgaaaacatcctacatggactcattaaaacttctaacgctcctgattgtgtctcgaatgcctcgtacaaggatttcaaggatgccatagattctttgaccaacgatttagaattgcgtttagcatctgatttttttattaaatcgaatggtcggctctctggtttgctaccccaatgataacaatagtcttgtaaagataaaccgcaagaaaatttatacgcatccatccaaataaccctagcaccatcggatgatattaatgtattattatagattttccatccacaattattgggccagtatactgttagcaacggtatatcgaatagattactcatgtaacctactagaatgatagttcgtgtactagtcataatatctttaatccaatctaaaaaatttaaaattagattttttacactgttaaagttaacaaaagtattacccgggtacgtggatatcatatatggcattggtccattatcagtaatagctccataaactgatacggcgatggtttttatatgtgtttgatctaacgaggaagaaattcgcgcccacaattcatctctagatatgtatttaatatcaaacggtaacacatcaatttcgggacgcgtatatgtttctaaatttttaatccaaatataatgatgacctatatgccctattatcatactgtcaactatagtacacctagggaacttacgatacatctgtttcctataatcgttaaattttacaaatctataacatgctaaaccttttgacgacagccattcattaatttctgatatggaatctgtattctcgataccgtatcgttctaaagccagtgctatatctccctgttcgtgggaacgctttcgtataatatcgatcaacggataatctgaagtttttggagaataatatgactcatgatctatttcgtccataaacaatctagacataggaattggaggcgatgatcttaattttgtgcaatgagtcgtcaatcctataacttctaatcttgtaatattcatcatcgacataatactatctatgttatcatcgtatattagtataccatgaccttcttcatttcgtgccaaaatgatatacagtcttaaatagttacgcaatatctcaatagtttcataattgttagctgttttcatcaaggtttgtatcctgtttaacatgatggcgttctataacgtctctattttctatttttaattttttaaatttttaacgatttactgtggctagatacccaatctctctcaaatatttttttagcctcgcttacaagctgtttatctatactattaaaactgacgaatccgtgattttggtaatgggttccgtcgaaatttgccgaagtgatatgaacatattcgtcgtcgactatcaacaattttgtattattctgaatagtgaaaaccttcacagatagatcattttgaacacacaacgcatctagacttttggcggttgccatagaatatacgtcgttcttatcccaattaccaactagaagtctgatcttaactcctctattaatggctgcttctataatggagttgtaaatgtcgggccaatagtagctattaccgtcgacacgtgtagtgggaactatggccaaatgttcaatatctatactagtcttagctgacctgagtttatcaataactacatcggtatctagatctctagaatatcccaataggtgttccggagaatcagtaaagaacactccacctataggattcttaatatgatacgcagtgctaactggcaaacaacaagccgcagagcataaattcaaccatgaattttttgcgctattaaaggctttaaaagtatcaaatcttctacgaagatctgtggccagcgggggataatcagaatatacacctaacgttttaatcgtatgtatagatcctccagtaaatgacgcgtttcctacataacatctttcatcatctgacacccaaaaacaaccgagtagtagtcccacattattttttttatctatattaacggttataaaatttatatccgggcagtgactttgtagctctcccagatttcttttccctcgttcatctagcaaaactattattttaatccctttttcagatgcctcttttagtttatcaaaaataagcgctcccctagtcgtactcagaggattacaacaaaaagatgctatgtatatatatttcttagctagagtgataatttcgttaaaacattcaaatgttgttaaatgatcggatctaaaatccatattttctggtagtgtttctaccagcctacattttgctcccgcaggtaccgatgcaaatggccacatttagttaacataaaaacttatacatcctgttctatcaacgattctagaatatcatcggctatatcgctaaaattttcatcaaagtcgacatcacaacctaactcagtcaatatattaagaagttccatgatgtcatcttcgtctatttctatatccgtatccattgtagattgttgaccgattatcgagtttaaatcattactaatactcaatccttcagaatacaatctgtgtttcattgtaaatttataggcggtgtatttaagttggtagattttcaattatgtattaatatagcaacagtagttcttgctcctccttgattctagcatcctcttcattattttcttctacgtacataaacatgtccaatacgttagacaacacaccgacgatggcggccgcagatctcgagttatgatctacttccttaccgtgcaataaattagaatatattttctacttttacgagaaattaattattgtatttattatttatgggtgaaaaacttactataaaaagcgggtgggtttggaattagtgaaagcttaaaaattgaaattttattttttttttttggaatataaataagctcgaagtcgacagatctaggcctggtaccaggaggaggaattcagcttaaagatgacttcgaaagtttatgatccagaacaaaggaaacggatgataactggtccgcagtggtgggccagatgtaaacaaatgaatgttcttgattcatttattaattattatgattcagaaaaacatgcagaaaatgctgttatttttttacatggtaacgcggcctcttcttatttatggcgacatgttgtgccacatattgagccagtagcgcggtgtattataccagatcttattggtatgggcaaatcaggcaaatctggtaatggttcttataggttacttgatcattacaaatatcttactgcatggtttgaacttcttaatttaccaaagaagatcatttttgtcggccatgattggggtgcttgtttggcatttcattatagctatgagcatcaagataagatcaaagcaatagttcacgctgaaagtgtagtagatgtgattgaatcatgggatgaatggcctgatattgaagaagatattgcgttgatcaaatctgaagaaggagaaaaaatggttttggagaataacttcttcgtggaaaccatgttgccatcaaaaatcatgagaaagttagaaccagaagaatttgcagcatatcttgaaccattcaaagagaaaggtgaagttcgtcgtccaacattatcatggcctcgtgaaatcccgttagtaaaaggtggtaaacctgacgttgtacaaattgttaggaattataatgcttatctacgtgcaagtgatgatttaccaaaaatgtttattgaatcggatccaggattcttttccaatgctattgttgaaggcgccaagaagtttcctaatactgaatttgtcaaagtaaaaggtcttcatttttcgcaagaagatgcacctgatgaaatgggaaaatatatcaaatcgttcgttgagcgagttctcaaaaatgaacaagcggccgccgccaccatgagcaagggcgaggaactgttcactggcgtggtcccaattctcgtggaactggatggcgatgtgaatgggcacaaattttctgtcagcggagagggtgaaggtgatgccacatacggaaagctcaccctgaaattcatctgcaccactggaaagctccctgtgccatggccaacactggtcactaccttcacctatggcgtgcagtgcttttccagatacccagaccatatgaagcagcatgactttttcaagagcgccatgcccgagggctatgtgcaggagagaaccatctttttcaaagatgacgggaactacaagacccgcgctgaagtcaagttcgaaggtgacaccctggtgaatagaatcgagctgaagggcattgactttaaggaggatggaaacattctcggccacaagctggaatacaactataactcccacaatgtgtacatcatggccgacaagcaaaagaatggcatcaaggtcaacttcaagatcagacacaacattgaggatggatccgtgcagctggccgaccattatcaacagaacactccaatcggcgacggccctgtgctcctcccagacaaccattacctgtccacccagtctgccctgtctaaagatcccaacgaaaagagagaccacatggtcctgctggagtttgtgaccgctgctgggatcacacatggcatggacgagctgtacaagtgagcggccgccctgctagcaagcttgctagcggccgctcgagatctgcggccgctacagacacgaatatgactaaaccgatgaccatttaaaaacccctctctagctttcacttaaactgtatcgatcattcttttagcacatgtataatataaaaacattattctatttcgaatttaggcttccaaaaatttttcatccgtaaaccgataataatatatatagacttgttaatagtcggaataaatagattaatgcttaaactatcatcatctccacgattagagatacaatatttacattctttttgctgtttcgaaactttatcaatacacgttaatacaaacccaggaaggagatattgaaactgaggctgttgaaaatgaaacggtgaatacaataattcagataatgtaaaatcatgattccgtattctgatgatattagaactgctaatggatgtcgatggtatgtatctaggagtatctattttaacaaagcatcgatttgctaatatacaattatccttttgattaattgttattttattcatattcttaaaaggtttcatatttatcaattcttctacattaaaaatttccatttttaatttatgtagccccgcaatactcctcattacgtttcattttttgtctataatatccattttgttcatctcggtacatagattatccaattgagaagcgcatttagtagttttgtacattttaagtttattgacgaatcgtcgaaaactagttatagttaacattttattatttgataccctgatattaatacccctgccgttactattatttataactgatgtaatccacgtaacattggaattaactatcgatagtaatgcatcgacgcttccaaaattgtctattataaactcaccgataatttttttattgcatgttttcatattcattaggattatcaaatctttaatcttattacgattgtatgcgttgatattacaagacgtcattctaaaagacggaggatctccatcaaatgccagacaatcacgtacaaagtacatggaaataggttttgttctattgcgcatcatagatttatatagaacacccgtagaaatactaatttgttttactctataaaatactaatgcatctatttcatcgttttgtataacgtctttccaagtgtcaaattccaaatttttttcattgatagtaccaaattcttctatctctttaactacttgcatagataggtaattacagtgatgcctacatgccgttttttgaaactgaatagatgcgtctagaagcgatgctacgctagtcacaatcaccactttcatatttagaatatatatatgtaaaaatatagtagaatttcattttgtttttttctatgctataaatgaattctcattttgcatctgctcatactccgttttatattaataccaaagaaggaagatatctggttctaaaagccgttaaagtatgcgatgttagaactgtagaatgcgaaggaagtaaagcttcctgcgtactcaaagtagataaaccctcatcgcccgcgtgtgagagaagaccttcgtccccgtccagatgcgagagaatgaataaccctggaaaacaagttccgtttatgaggacggacatgctacaaaatatgttcgcggctaatcgcgataatgtagcttctagacttttgtcctaaaatactattatatccttttcgatattaataaatccgtgtcgtccaggttttttatctctttcagtatgtgaatagataggtattttatctctattcatcatcgaatttaagagatccgataaacattgtttgtattctccagatgtcagcatctgatacaacaatatatgtgcacataaacctctggcacttatttcatgtaccttccccttatcactaaggagaatagtatttgagaaatatgtatacatgatattatcatgaattagatatacagaatttgtaacactctcgaaatcacacgatgtgtcggcgttaagatctaatatatcactcgataacacattttcatctagatacactagacattttttaaagctaaaatagtctttagtagtaacagtaactatgcgattattttcatcgatgatacatttcatcggcatattattacgcttaccatcaaagactataccatgtgtatatctaacgtattctagcatggttgccatacgcgcattaaacttttcaggatctttggatagatcttccaatctatctatttgagaaaacatttttatcatgttcaatagttgaaacgtcggatccactatatagatattatctataaagattttaggaactacgttcatggtatcctggcgaatattaaaactatcaatgatatgattatcgttttcatcttttatcaccatatagtttctaagatatgggattttacttaatataatattatttcccgtgataaattttattagaaaggccaaatctataagaaaagtcctagaattagtctgaagaatatctatatcgccgtatagtatatttggattaattagatatagagaatatgatccgtaacatatacaacttttattatggcgtctaagatattcttccatcaacttattaacatttttgactagggaagatacattatgacgtcccattacttttgccttgtctattactgcgacgttcatagaatttagcatatctcttgccaattcttccattgatgttacattataagaaattttagatgaaattacatttggagctttaatagtaagaactcctaatatgtccgtgtatgtggtcactaatacagattgtagttctataatcgtaaataatttacctatattatatgtttgagtctgtttagaaaagtagctaagtatacgatcttttatttctgatgcagatgtattaacatcggaaaaaaatctttttttattcttttttactaaagatacaaatatgtctttgttaaaaacagttattttctgaatatttctagcttgtaattttaacatatgatattcgttcacactaggtactctgcctaaataggtttctataatctttaatgtaatattaggaaaagtattctgatcaggattcctattcattttgaggatttaaaactctgattattgtctaatatggtctctacgcaaactttttcacagagcgatagagtttttgataactcgtttttcttaagaaatataaaactactgtctccagagctcgctctatcttttattttatctaattcgatacaaactcctgatactggttcagaaagtaattcattaattttcagtcctttatagaagatatttaatatagataatacaaaatcttcagtttttgatatcgatctgattgatcctagaactagatatattaataacgtgctcattaggcagtttatggcagcttgataattagatatagtatattccagttcatatttattagataccgcattgcccagattttgatattctatgaattcctctgaaaataaatccaaaataactagacattctattttttgtggattagtgtactctcttccctctatcatgttcactactggtgtccacgatgataaatatctagagggaatataatatagtccataggatgccaatctagcaatgtcgaataactgtaattttattcttcgctcttcattatgaattgattcttgaggtataaacctaacacaaattatattattagacttttcgtatgtaatgtctttcatgttataagtttttaatcctggaatagaatctattttaatgaggcttttaaacgcagagttctccaacgagtcaaagcataatactctgttgtttttcttatatacgatgttacgattttcttctttgaatggaataggtttttgaattagtttataattacaacataatagataaggaagtgtgcaaatagtacgcggaaaaaacataatagctcccctgttttcatccatggttttaagtaaatgatcactggcttctttagtcaatggatattcgaacattaaccgtttcatcatcattggacagaatccatatttcttaatgtaaagagtgatcaaatcattgtgtttattgtaccatcttgttgtaaatgtgtattcggttatcggatctgctcctttttctattaaagtatcgatgtcaatctcgtctaagaattcaactatatcgacatatttcatttgtatacacataaccattactaacgtagaatgtataggaagagatgtaacgggaacagggtttgttgattcgcaaactattctaatacataattcttctgttaatacgtcttgcacgtaatctattatagatgccaagatatctatataattattttgtaagatgatgttaactatgtgatctatataagtagtgtaataattcatgtattttgatatatgttccaactctgtctttgtgatgtctagtttcgtaatatctatagcatcctcaaaaaatatattcgcatatattcccaagtcttcagttctatcttctaaaaaatcttcaacgtatggaatataataatctattttacctcttctgatatcattaatgatatagtttttgacactatcttctgtcaattgattcttattcactatatctaagaaacggatagcgtccctaggacgaactactgccattaatatctctattatagcttctggacataattcatctattataccagaattaatgggaactattccgtatctatctaacatagttttaagaaagtcagaatctaagacttgatgttcatatattggttcatacatgaaatgatctctattgatgatagtgactatttcattctctgaaaattggtaactcattctatatatgctttccttgttgatgaaggatagaatatactcaatagaatttgtaccaacaaactgttctcttatgaatcgtatatcatcatctgaaataatcatgtaaggcatacatttaacaattagagacttgtctcctgttatcaatatactattcttgtgataatttatgtgtgaggcaaatttgtccacgttctttaattttgttatagtagatatcaaatccaatggagctacagttcttggcttaaacagatatagtttttctggaacaaattctacaacattattataaaggactttgggtagataagtgggatgaaatcctattttaattaatgcgatagccttgtcctcgtgcagatatccaaacgcttttgtgatagtatggcattcattgtctagaaacgctctacgaatatctgtgacagatatcatctttagagaatatactagtcgcgttaatagtactacaatttgtattttttaatctatctcaataaaaaaattaatatgtatgattcaatgtataactaaactactaactgttattgataactagaatcagaatctaatgatgacgtaaccaagaagtttatctactgccaatttagctgcattatttttagcatctcgtttagattttccatcggccttatcgaatactcttccgtcgatgtctacacaggcataaaatgtaggagagttactaggcccaactgattcaatacgaaaagaccaatctctcctagtaatttggcagtactcattaataacggtgacagggttagcatctttccaatcaataatttttttagccggaataacatcatcaaaagacttatgatcctctctcattgatttttcgcgggatacatcatctattatgacgtcagccatagcatcagcatccggcttatccgcctccgttgtcataaaccaacgaggaggaatatcgtcggagctgtacaccatagcactacgttgaagatcgtacagagctttattaacttctcgcttctccatattaagttgtctagttagttgtgcagcagtagctccttcgattccaatgtttttaatagccgcacacacaatctctgcgtcagaacgctcgtcaatatagatcttagacatttttagagagaactaacgcaaccagcaataaaactgaacctactttatcatttttttattcatcatcctctggtggttcgtcgttcctatcaaatgtagctctgattaacccgtcatctataggtgatgctggttctggagattctggaggagatggattattatctggaagaatctctgttatttccttgttttcatgtatcgattgcgttgtaacattaagattgcgaaatgctctaaatttgggaggcttaaagtgttgtttgcaatctctacacgcgtgtctaactagtggaggttcgtcagctgctctagtttgaatcatcatcggcgtagtattcctacttttacagttaggacacggtgtattgtatttctcgtcgagaacgttaaaataatcgttgtaactcacatcctttattttatctatattgtattctactcctttcttaatgcattttataccgaataagagatagcgaaggaattctttttcggtgccgctagtacccttaatcatatcacatagtgttttatattccaaatttgtggcaatagacggtttatttctatacgatagtttgtttctggaatcctttgagtattctataccaatattattctttgattcgaatttagtttcttcgatattagattttgtattacctatattcttgatgtagtactttgatgatttttccatggcccattctattaagtcttccaagttggcatcatccacatattgtgatagtaattctcggatatcagtagcggctaccgccattgatgtttgttcattggatgagtaactactaatgtatacattttccatttataacacttatgtattaactttgttcatttatattttttcattattatgttgatattaacaaaagtgaatatatatatgttaataattgtattgtggttatacggctacaattttataatgagtgaaagtcagtgtccgatgatcaatgacgatagctttactctgaaaagaaagtatcaaatcgatagtgcggagtcaacaataaaaatggataagaagaggataaagtttcagaatagagccaaaatggtaaaagaaataaatcagacaataagagcagcacaaactcattacgagacattgaaactaggatacataaaatttaagagaatgattatgactactactctagaagatatagcaccatctattccaaataatcagaaaacttataaactattctcggacatttcagccatcggcaaagcatcacagaatccgagtaagatggtatatgctctgctgctttacatgtttcccaatttgtttggagatgatcatagattcattcgttatagaatgcatccaatgagtaaaatcaaacacaagatcttctctcctttcaaacttaatcttattagaatattagtggaagaaagattctataataatgaatgcagatctaataaatggagaataattggaacacaagttgataaaatgttgatagctgaatctgataaatatacaatagatgcaaggtataacctaaaacccatgtatagaatcaagggagaatctgaagaagataccctctttatcaaacagatggtagaacaatgtgtgacatcccaggaattggtggaaaaagtgttgaagatactgtttagagatttgttcaagagtggagaatacaaagcgtacagatacgatgatgatgtagaaaatggatttattggattggatacactaaaattaaacattgttcatgatatagttgaaccatgtatgcctgttcgtaggccagtggctaagatactgtgtaaagaaatggtaaataaatactttgagaatccgctacatattattggtaaaaatcttcaagagtgcattgactttgttagtgaataggcatttcatctttctccaatactaattcaaattgttaaattaataatggatagtataaatagttattagttataagatagtaaaaataattattagaataagagtgtagtatcatagataactctcttctataaaaatggattttattcgtagaaagtatcttatatacacagtagaaaataatatagattttttaaaggatgatacattaagtaaagtaaacaattttaccctcaatcatgtactagctctcaagtatctagttagcaattttcctcaacacgttattactaaggatgtattagctaataccaatttttttgttttcatacatatggtacgatgttgtaaagtgtacgaagcggttttacgacacgcatttgatgcacccacgttgtacgttaaagcattgactaagaattatttatcgtttagtaacgcaatacaatcgtacaaggaaaccgtgcataaactaacacaagatgaaaaatttttagaggttgccgaatacatggacgaattaggagaacttataggcgtaaattatgacttagttcttaatccattatttcacggaggggaacccatcaaagatatggaaatcatttttttaaaactgtttaagaaaacagacttcaaagttgttaaaaaattaagtgttataagattacttatttgggcatacctaagcaagaaagatacaggcatagagtttgcggataatgatagacaaaatatatacactctatttcaacaaactggtagaatcgtccatagcaatctaacagaaacgtttagagattatatctttcccggagataagactagctattgggtgtggttaaacgaaagtatagctaatgatgcggatatcgttcttaatagacacgccattaccatgtatgataaaattcttagttatatatactctgagataaaacaaggacgcgttaataaaaacatgcttaagttagtttatatctttgagcctgaaaaagatatcagagaacttctgctagaaatcatatatgatattcctggagatatcctatctattattgatgcaaaaaacgacgattggaaaaaatattttattagtttttataaagctaattttattaacggtaatacatttattagtgatagaacgtttaacgaggacttattcagagttgttgttcaaatagatcccgaatatttcgataatgaacgaattatgtctttattctctacgagtgctgcggacattaaacgatttgatgagttagatattaataacagttatatatctaatataatttatgaggtgaacgatatcacattagatacaatggatgatatgaagaagtgtcaaatctttaacgaggatacgtcgtattatgttaaggaatacaatacatacctgtttttgcacgagtcggatcccatggtcatagagaacggaatactaaagaaactgtcatctataaaatccaagagtagacggctgaacttgtttagcaaaaacattttaaaatattatttagacggacaattggctcgtctaggtcttgtgttagatgattataaaggagacttgttagttaaaatgataaaccatcttaagtctgtggaggatgtatccgcattcgttcgattttctacagataaaaaccctagtattcttccatcgctaatcaaaactattttagctagttataatatttccatcatcgtcttatttcaaaggtttttgagagataatctatatcatgtagaagaattcttggataaaagcatccatctaaccaagacggataagaaatatatacttcaattgataagacacggtagatcatagaacagaccaaatatattattaataatttgtatatacatagatataattatcacacatttttgataaatgggaactgctgcaacaattcagactcccaccaaattaatgaataaagaaaatgcagaaatgattttggaaaaaattgttgatcatatagttatgtatattagtgacgaatcaagtgattcagaaaataatcctgaatatattgattttcgtaacagatacgaagactatagatctctcattataaaaagtgatcacgagtttgtaaagctatgtaaaaatcatgcggagaaaagttctccagaaacgcaacaaatgattatcaaacacatatacgaacaatatcttattccagtatctgaagtactattaaaacctataatgtccatgggtgacataattacatataacggatgtaaagacaatgaatggatgctagaacaactctctaccctaaactttaacaatctccgcacatggaactcatgtagcataggcaatgtaacgcgtctgttttatacattttttagttatctgatgaaagataaactaaatatataagtataatcccattctaatactttaacctgatgtattagcatcttattagaatattaacctaactaaaagacataacataaaaactcattacatagttgataaaaagcggtaggatataaatattatggctgccaccgttccgcgttttgacgacgtgtacaaaaatgcacaaagaagaattctagatcaagaaacattttttagtagaggtctaagtagaccgttaatgaaaaacacatatctatttgataattacgcgtatggatggataccagaaactgcaatttggagtagtagatacgcaaacctagatgctagtgactattatcccatttcgttgggattacttaaaaagttcgagtttctcatgtctctatataaaggtcctattcccgtatatgaagaaaaagtaaatactgaattcatagccaatggatcgttctctggtagatacgtatcatatcttcgaaagttttctgcccttccaacaaacgagtttattagttttttgttactgacttccattccaatctataatatcttgttctggtttaaaaacacacagtttgatattactaaacacacattattcagatacgtctatacagataatgccaaacacctggcgttggctaggtatatgcatcaaacaggagactataagcctttgtttagtcgtctcaaagagaattatatatttaccggtcccgttccaataagtatcaaagatatagatcaccctaatcttagtagagcaagaagtccatccgattatgagacattagctaatattagtactatattgtactttaccaagtatgatccggtattaatgtttttattgttttacgtacctgggtattcaattactacaaaaattactccagccgtagaatatctaatggataaactgaatctaacaaagagcgacgtacaactgttgtaaattattttatgcttcgtaaaatgtaggttttgaaccaaacattctttcaaagaatgagatgcataaaactttattatccaatagattgactatttcggacgtcaatcgtttaaagtaaacttcgtaaaatattctttgatcactgccgagtttaaaacttctatcgataattgtctcatatgttttaatatttacaagttttttggtccatggtacattagccggacaaatatatgcaaaataatatcgttctccaagttctatagtttctggattatttttattatattcagtaactaaatacatattagggttatctgcggatttataatttgagtgatgcattctactcaacataaataattctagaggagacgatctactatcaaattcggatcgtaaatctgtttctaaagaacggagaatatctatacatacctgattagaattcatccgtccttcagacaacatctcagacagtctggttttgtacatcttaatcatattcttatgaaacttggaaacatctcttctagtttcactagtacctttattaattctctcaggtacagattttgaattcgacgatgctgagtatttcatcgttgtatatttcttcttcgattgcataatcagattcttatataccgcctcaaactctattttaaaattattaaacaatactctattattaatcagtcgttctaactctttcgctatttctatagacttatctacatcttgactgtctatctctgtaaacacggagtcggtatctccatacacgctacgaaaacgaaatctgtaatctataggcaacgatgttttcacaatcggattaatatctctatcgtccatataaaatggattacttaatggattggcaaaccgtaacataccgttagataactctgctccatttagtaccgattctagatacaagatcattctacgtcctatggatgtgcaactcttagccgaagcgtatgagtatagagcactatttctaaatcccatcagaccatatactgagttggctactatcttgtacgtatattgcatggaatcatagatggccttttcagttgaactggtagcctgttttagcatctttttatatctggctctctctgccaaaaatgttcttaatagtctaggaatggttccttctatcgatctatcgaaaattgctatttcagagatgaggttcggtagtctaggttcacaatgaaccgtaatatatctaggaggtggatatttctgaagcaatagctgattatttatttcttcttccaatctattggtactaacaacgacaccgactaatgtttccggagatagatttccaaagatacacacattaggatacagactgttataatcaaagattaatacattattactaaacattttttgttttggagcaaataccttaccgccttcataaggaaacttttgttttgtttctgatctaactaagatagttttagtttccaacaatagctttaacagtggacccttgatgactgtactcgctctatattcgaataccatggattgaggaagcacatatgttgacgcacccgcgtctgtttttgtttctactccataatactcccacaaatactgacacaaacaagcatcatgaatacagtatctagccatatctaaagctatgtttagattataatccttatacatctgagctaaatcaacgtcatcctttccgaaagataatttatatgtatcattaggtaaagtaggacataatagtacgactttaaatccattttcccaaatatctttacgaattactttacatataatatcctcatcaacagtcacataattacctgtggttaaaacctttgcaaatgcagcggctttgcctttcgcgtctgtagtatcgtcaccgatgaacgtcatttctctaactcctctatttaatactttacccatgcaactgaacgcgttcttggatatagaatccaatttgtacgaatccaatttttcaaatttttgaatgaatgaatatagatcgaaaaatatagttccattattgttattaacgtgaaacgtagtattggccatgccgcctactcccttatgactagactgatttctctcataaatacagagatgtacagcttcctttttgtccggagatctaaagataattttctctcctgttaataactctagacgattagtaatatatctcagatcaaagttatgtccgttaaaggtaacgacgtagtcgaacgttagttccaacaattgtttagctattcgtaacaaaactatttcagaacatagaactagttctcgttcgtaatccatttccattagtgactgtatcctcaaacatcctctatcgacggcttcttgtatttcctgttccgttaacatctcttcattaatgagcgtaaacaataatcgtttaccacttaaatcgatataacagtaacttgtatgcgagattgggttaataaatacagaaggaaacttcttatcgaagtgacactctatatctagaaataagtacgatcttgggatatcgaatctaggtatttttttagcgaaacagttacgtggatcgtcacaatgataacatccattgttaatctttgtcaaatattgctcgtccaacgagtaacatccgtctggagatatcccgttagaaatataaaaccaactaatattgagaaattcatccatggtggcattttgtatgctgcgtttctttggctcttctatcaaccacatatctgcgacggagcattttctatctttaatatctagattataacttattgtctcgtcaatgtctatagttctcatctttcccaacggcctcgcattaaatggaggaggagacaatgactgatatatttcgtccgtcactacgtaataaaagtaatgaggaaatcgtataaatacggtctcgccatttcgacatctggatttcagatataaaaatctgttttcaccgtgactttcaaaccaattaatgcaccgaacatccatttatagaatttagaaatatattttcatttaaatgaatcccaaacattggggaagagccgtatggaccattatttttatagtactttcgcaagcgggtttagacggcaacatagaagcgtgtaaacgaaaactatatactatagttagcactcttccatgtcctgcatgtagacggcacgcgactatcgctatagaggacaataatgtcatgtctagcgatgatctgaattatatttattattttttcatcagattatttaacaatttggcatctgatcccaaatacgcgatcgatgtgacaaaggttaaccctttataaacttaacccattataaaacttatgattagtcacaactgaaataaccgcgtgattattttttggtataattctacacggcatggtttctgtgactatgaattcaacccccgttacattagtgaaatctttaacaaacagcaagggttcgtcaaagacataaaactcattgtttacaatcgaaatagaccccctatcacacttaaaataaaaaatatccttatcctttaccaccaaataaaattctgattggtcaatgtgaatgtattcacttaacagttccacaaatttatttattaactccgaggcacatacatcgtcggtattttttatggcaaactttactcttccagcatccgtttctaaaaaaatattaacgagttccatttatatcatccaatattattgaaatgacgttgatggacagatgatacaaataagaaggtacggtacctttgtccaccatctcctccaattcatgctctattttgtcattaactttaatgtatgaaaacagtacgccacatgcttccatgacagtgtgtaacactttggatacaaaatgtttgacattagtataattgtccaagactgtcaatctataatagatagtagctataatatattctatgatggtattgaagaagatgacaaccttggcatattgatcatttaacacagacatggtatcaacagatagcttgaatgaaagagaatcagtaattggaataagcgtcttctcgatagagtgtccgtataccaacatgtctgatattttgatgtattccattaaattatttagttttttctttttattctcgttaaacagcatttctgtcaacggaccccaacatcgttgaccgattaagttttgattgatttttccgtgtaaggcgtatctagtcagatcgtatagcctatccaataatccatcgtctgtgtgtagatcacatcgtacactttttaattctctatagaagagcgacagacatctggagcaattacagacagcaatttctttattctctacagatgtaagatacttgaagacattcctatgatgatgcagaattttggataacacggtattgatggtatctgttaccataattcctttgatggctgatagtgtcagagcacaagatttccaatctttgacaatttttagcaccattatctttgttttgatatctatatcagacagcatggtgcgtctgacaacacagggattaagacggaaagatgaaatgattctctcaacatcttcaatagataccttgctattttttctggcattatctatatgtgcgagaatatcctctagagaatcagtatcctttttgatgatagtggatctcaatgacatgggacgtttaaaccttcttattctatcaccagattgcatggtgatttgtcttctttcttttatcataatgtaatctctaaattcatcggcaaattgtctatatctaaaatcataatatgagatgtttacctctacaaatatctgttcgtccaatgttagagtatttacatcagttttgtattccaaattaaacatggcaacggatttaattttatattcctctattaagtcctcgtcgataataacagaatgtagataatcatttaatccgtcgtacatggttggaagatgcttgttgacaaaatctttaattgtcttgatgaaggtgggactatatctaacatcttgattaataaaatttataacattgtccataggatactttgtaactagttttatacacatctcttcatcggtaagtttagacagaatatcgtgaacaggtggtatattatattcatcagatatacgaagaacaatgtccaaatctatattgtttaatatattatatagatgtagcgtagctcctacaggaatatctttaactaagtcaatgatttcatcaaccgttagatctattttaaagttaatcatataggcattgatttttaaaaggtatgtagccttgactacattctcattaattaaccattccaagtcattgtgtgtaagaagattatattctatcataagcttgactacatttggtcccgataccattaaagaattcttatgatataaggaaacagattttaggtactcatctactctacaagaattttggagagccttaacgatatcagtgacgtttattatttcaggaggaaagaatctaacattgagaatatcggaattaatagcttccagatacagtgattttggcaatagtccgtgtaatccataatccagtaacacgagctggtgcttgctagacaccttttcaatgtttaatttttttgaaataagctttgataaagccttcctcgcaaattccggatacatgaacatgtcggcgacatgattaagtattgttttttcattatttttatattttctcaacaagttctcaataccccaatagatgatagaatatcacccaatgcgtccatgttgtctatttccaacaggtcgctatatccaccaatagaagtttttccaaaaaagattctaggaacagttctaccaccagtaatttgttcaaaataatcccgcaattcattttcgggtttaaattctttaatatcgacaatttcatacgctcctcttttgaaactaaacttatttagaatatccagtgcatttctacaaaaaggacatgtatacttgacaaaaattgtcactttgttattggccaacctttgttgtacaaattcctcggccattttaatatttaagtgatataaaactatctcgacttatttaactctttagtcgagatatatggacgcagatagctatatgatagccaactacagaaggcaaacgctataaaaaacataattacgacgagcatatttataaatatttttattcagcattacttgatatagtaatattaggcacagtcaaacattcaaccactctcgatacattaactctctcattttctttaacaaattctgcaatatcttcgtaaaaagattcttgaaactttttagaatatctatcgactctagatgaaatagcgttcgtcaacatactatgttttgtatacataaaggcgcccattttaacagtttctagtgacaaaatgctagcgatcctaggatcctttagaatcacatagattgacgattcgtctctcttagtaactctagtaaaataatcatacaatctagtacgcgaaataatattatccttgacttgaggagatctaaacaatctagttttgagaacatcgataagttcatcgggaatgacatacatactatctttaatagaactcttttcatccagttgaatggattcgtccttaaccaactgattaatgagatcttctattttatcattttccagatgatatgtatgtccattaaagttaaattgtgtagcgcttctttttagtctagcagccaatactttaacatcactaatatcgatatacaaaggagatgatttatctatggcattaagaattcgtttttcgacatccgtcaaaaccaattcctttttgcctgtatcatccagttttccatcctttgtaaagaaattattttctactagactattaataagactgataaggattcctccataattgcacaatccaaactttttaacaaaactagactttacgagatctacaggaatgcgtacttcaggttttttagcttgtgattttttcttttgcggacattttctagtaaccaactcatctaccatttcattgattttagcagtgaaataagctttcaatgcacgggcactgatactattgaaaacgagttgatcttcaaattccgccatttaagttcaccaaacaacttttaaatacaaatatatcaatagtagtagaataagaactataaaaaaaataataattaaccaaccccaacaaccggtattattagttgatgtggtagttttctcatcacttagaacagatttaacaatttctataaagtctgtcaaatcatcttccggagaccccataaatacaccaaatatagcggcgtacaacttatccatttatacattgaatattggcttttctttatcgctatcttcatcatattcatcatcaatatcaacaagtcccagattacgagccagatcttcttctacattttcagtcattgatacacgttcactatctccagagagtccgataacgttagccaccacttctctatcaatgattagtttcttgagcgcgaaagtaatttttgtttccgttccggatctatagaagacgataggtgtgataattgccttggccaattgtctttctcttttactgagtgattctagttcaccttctatagatctgagaatggatgattctccagtcgaaacatattctaccatggatccgtttaatttgttgatgaagatggattcatccttaaatgttttctctgtaatagtttccaccgaaagactatgcaaagaatttggaatgcgttccttgtgcttaatgtttccatagacggcttctagaagttgatacaacataggactagccgcggtaacttttatttttagaaagtatccatcgcttctatcttgtttagatttatttttataaagtttagtctctccttccaacataataaaagtggaagtcatttgactagataaactatcagtaagttttatagagatagacgaacaattagcgtattgagaagcatttagtgtaacgtattcgatacattttgcattagatttactaatcgattttgcatactctataacacccgcacaagtctgtagagaatcgctagatgcagtaggtcttggtgaagtttcaactctcttcttgattaccttactcatgattaaacctaaataattgtactttgtaatataatgatatatattttcactttatctcatttgagaataaaaatgtttttgtttaaccactgcatgatgtacagatttcggaatcgcaaaccaccagtggttttattttatccttgtccaatgtgaattgaatgggagcggatgcgggtttcgtacgtagatagtacattcccgtttttagaccgagactccatccgtaaaaatgcatactcgttagtttggaataactcggatctgctatatggatattcatagattgactttgatcgatgaaggctcccctgtctgcagccatttttatgatcgtcttttgtggaatttcccaaatagttttataaactcgcttaatatcttctggaaggtttgtattctgaatggatccaccatctgccataatcctattcttgatctcatcattccataattttctctcggttaaaactctaaggagatgcggattaactacttgaaattctccagacaatactctccgagtgtaaatattactggtatacggttccaccgactcattatttcccaaaatttgagcagttgatgcagtcggcataggtgccaccaataaactatttctaagaccgtatgttctgattttatcttttagaggttcccaattccaaagatccgacggtacaacattccaaagatcatattgtagaataccgttactggcgtacgatcctacatatgtatcgtatggtccttccttctcagctagttcacaactcgcctctaatgcaccgtaataaatggtttcgaagatcttcttatttagatcttgtgcttccaggctatcaaatggataatttaagagaataaacgcgtccgctaatccttgaacaccaataccgataggtctatgtctcttattagagatttcagcttctggaataggataataattaatatctataattttattgagatttctgacaattactttgaccacatccttcagtttgagaaaatcaaatcgcccatctattacaaacatgttcaaggcaacagatgccagattacaaacggctacctcattagcatccgcatattgtattatctcagtgcaaagattactacacttgatagttcctaaattttgttgattactctttttgttacacgcatccttataaagaatgaatggagtaccagtttcaatctgagattctataatcgctttccagacgactcgagcctttattatagatttgtatctcctttctctttcgtatagtgtatacaatcgttcgaactcgtctccccaaacattgtccaatccaggacattcatccggacacatcaacgaccactctccgtcatccttcactcgtttcataaagagatcaggaatccaaagagctataaatagatctctggttctatgttcctcgtttcctgtattctttttaagatcgaggaacgccataatatcagaatgccacggttccaagtatatggccataactccaggccgtttgtttcctccctgatctatgtatctagcggtgttattataaactctcaacattggaataataccgtttgatataccattggtaccggagatatagcttccactggcacgaatattactaattgatagacctattccccctgccattttagagattaatgcgcatcgttttaacgtgtcatagataccctctatgctatcatcgatcatgttaagtagaaaacagctagacatttggtgacgactagttcccgcattaaataaggtaggagaagcgtgcgtaaaccatttttcagaaagtagattgtacgtctcaatagctgagtctatatcccattgatgaattcctactgcgacacgcattaacatgtgctgaggtctttcaacgatcttgttgtttattttcaacaagtaggatttttccaaagttttaaaaccaaaatagttgtatgaaaagtctcgttcgtaaataataaccgagttgagtttatccttatatttgttaactatatccatggtgatacttgaaataatcggagaatgtttcccatttttaggattaacatagttgaataaatcctccatcacttcactaaatagtttttttgtttccttgtgtagatttgatacggctattctggcggctagaatggcataatccggatgttgtgtagtacaagtggctgctatttcggctgccagagtgtccaattctaccgttgttactccattatatattccttgaataaccttcatagctattttaataggatctatatgatccgtgtttaagccataacataattttctaatacgagacgtgattttatcaaacatgacattttccttgtatccatttcgtttaatgacaaacatttttgttggtgtaataaaaaaattatttaacttttcattaatagggatttgacgtatgtagcgtacaaaatgattgttcctggtatatagataaagagtcctatatatttgaaaatcgttacggctcgattaaactttaatgattgcatagtgaatatatcattaggatttaactccttgactatcatggcggcgccagaaattaccatcaaaagcattaatacagttataccgatcgcagttagaacggttatagcatccaccatttatatctaaaaattagatcaaagaatatgtgacaaagtcctagttgtatactgagaattgacgaaacaatgtttcttacatatttttttcttattagtaaccgacttaatagtaggaactggaaaactagacttgattattctataagtatagatacccttccaaataatattctctttgataaaagttccagaaaatgtagaattttttaaaaagttatcttttgctattaccaagattgtgtttagacgcttattattaatatgagtgatgaaatccacaccgcctctagatatcgcctttatttccacattagatggtaaatccaatagtgaaactatctttttaggaatgtatggactcgcgtttagaggagtaaacgtcttaggcgtcggaaaggatgattcatcaaacgaataaacaatttcacaaatggatgttaatgtattagtaggaaattttttgacgctattggaattgaagattctaatggatgatgttctacctatttcatccgataacatgttaatttccgacaccaacggttttaatatttcgatgatatacggtagtctctctttcggacttatatagcttattccacaatacgagtcattatatactccaaaaaacaaaataactagtataaaatctgtatcgaatgggaaaaacgaaattatcgacataggtatagaatccggaacattgaacgtattaatacttaattctttttctgtggtaagtaccgataggttattgacattgtatggttttaaatattctataacttgagacttgatagatattagtgatgaattgaaaattatttttatcaccacgtgtgtttcaggatcatcgtcgacgcccgtcaaccaaccgaacggagtaaaataaatatcattaatatatgctctagatattagtatttttatcaatcctttgattatcatcttctcgtaggcgaatgattccatgatcaagagtgatttaagaacatcctccggagtattaatgggcttagtaaacagtccatcgttgcaataataaaagttatccaagttaaaggatattatgcattcgtttaaagatatcacctcatctgacggagacaattttttggtaggttttagagactttgaagctacttgtttaacaaagttattcatcgtcgtctactattctatttaattttgtagttaatttatcacatatcacattaattgactttttggtccacttttccatacgtttatattcttttaatcctgcgttatccgtttccgttatatccagggatagatcttgcaagttaaatagaatgctcttaaataatgtcattttcttatccgctaaaaatttaaagaatgtataaacctttttcagagatttgaaactcttaggtggtgtcctagtacacaatatcataaacaaactaataaacattccacattcagattccaacagctgattaacttccacattaatacagcctattttcgctccaaatgtacattcgaaaaatctgaataaaacatcgatgtcacaatttgtattatccaatacagaatgtttgtgattcgtgttaaaaccatcggagaaggaatagaaataaaaattattatagtggtggaattcagttggaatattgcctccggagtcataaaaggatactaaacattgttttttatcataaattacacatttccaatgagacaaataacaaaatccaaacattacaaatctagaggtagaacttttaattttgtctttaagtatatacgataagatatgtttattcataaacgcgtcaaatttttcatgaatcgctaaggagtttaagaatctcatgtcaaattgtcctatataatccacttcggatccataagcaaactgagagactaagttcttaatacttcgattgctcatccaggctcctctctcaggctctattttcatcttgacgacctttggattttcaccagtatgtattcctttacgtgataaatcatcgattttcaaatccatttgtgagaagtctatcgccttagatactttttcccgtagtcgaggtttaaaaaaatacgctaacggtatactagtaggtaactcaaagacatcatatatagaatggtaacgcgtctttaactcgtcggttaactctttcttttgatcgagttcgtcgctactattgggtctgctcaggtgccccgactctactagttccaacatcataccgataggaatacaagacactttgccggcggttgtagatttatcatatttttccactacatatccgttacaatttgttaaaaatttagatacatctatattgctacataatccagctagtgaatatatatgacataataaattggtaaatcctagttctggtattttactaattactaaatctgtatatctttccatttatcatggaaaagaatttaccagatatcttcttttttccaaactgcgttaatgtattctcttacaaatattcacaagatgaattcagtaatatgagtaaaacggaacgtgatagtttctcattggccgtgtttccagttataaaacatagatggcataacgcacacgttgtaaaacataaaggaatatacaaagttagtacagaagcacgtggaaaaaaagtatctcctccatcactaggaaaacccgcacacataaacctaaccgcgaagcaatatatatacagtgaacacacaataagctttgaatgttatagttttctaaaatgtataacaaatacagaaatcaattcgttcgatgagtatatattaagaggactattagaagctggtaatagtttacagatattttccaattccgtaggtaaacgaacagatactataggtgtactagggaataagtatccatttagcaaaattccattggcctcattaactcctaaagcacaacgagagatattttcagcgtggatttctcatagacctgtagttttaactggaggaactggagtgggtaagacgtcacaggtacccaagttattgctttggtttaattatttatttggtggattctctactctagataaaatcactgactttcacgaaagaccagtcattctatctcttcctaggatagctttagttagattgcatagcaataccattttaaaatcattgggatttaaggtactagatggatctcctatttctttacggtacggatctataccggaagaattaataaacaaacaaccaaaaaaatatggaattgtattttctacccataagttatctctaacaaaactatttagttatggcactcttattatagacgaagttcatgagcatgatcaaataggagatattattatagcagtagcgagaaagcatcatacgaaaatagattctatgtttttaatgactgccacgttagaggatgacagggaacggctaaaagtatttttacctaatcccgcatttatacatattcctggagatacactgtttaaaattagcgaggtatttattcataataagataaatccatcttccagaatggcatacatagaagaagaaaagagaaatttagttactgctatacagatgtatactcctcctgatggatcatccggtatagtctttgtggcatccgttgcacagtgtcacgaatataaatcatatttagaaaaaagattaccgtatgatatgtatattattcatggtaaggtcttagatatagacgaaatattagaaaaagtgtattcatcacctaatgtatcgataattatttctactccttatttggaatccagcgttactatacgcaatgttacacacatttatgatatgggtagagtttttgtccccgctccttttggaggatcgcaacaatttatttctaaatctatgagagatcaacgaaaaggaagagtaggaagagttaatcctggtacatacgtctatttctatgatctgtcttatatgaagtctatacagcgaatagattcagaatttctacataattatatattgtacgctaataagtttaatctaacactccccgaagatttgtttataatccctacaaatttggatattctatggcgtacaaaggaatatatagactcgttcgatattagtacagaaacatggaataaattattatccaattattatatgaagatgatagagtatgctaaactttatgtactaagtcctattctcgctgaggagttggataactttgagaggacgggagaattaactagtattgtacgagaagccattttatctctaaatttacaaattaagattttaaattttaaacataaagatgatgatacgtatatacacttttgtaaaatattattcggtgtctataacggaacaaacgctactatatattatcatagacctctaacgggatatatgaatatgatttcagatactatatttgttcctgtagataataactaaaaatcaaactctaatgaccacatctttttttagagatgaaaaattttccacatctccttttgtagacacgactaaacattttgcagaaaaaagtttattagtgtttagataatcgtatacttcatcagtgtagatagtaaatgtgaacagataaaaggtattcttgctcaatagattggtaaattccatagaatatattaatcctttcttcttgagatcccacatcatttcaaccagagacgttttatccaatgatttacctcgtactataccacatacaaaactagattttgcagtgacgtcgtacctggtattcctaccaaacaaaattttacttttagttcttttagaaaattctaaggtagaatctctatttgccaatatgtcatctatggaattaccactagcaaaaaatgatagaaatatatattgatacatcgcagctggttttgatctactatactttaaaaacgaatcagattccataattgcctgtatatcatcagctgaaaaactatgttttacacgtattccttcggcatttctttttaatgatatatcttgtttagacaatgataaagttatcatgtccatgagagacgcgtctccgtatcgtataaatatttcattagatgttagacgcttcattaggggtatacttctataaggtttcttaatcagtccatcattggttgcgtcaagaactactatcggatgttgttgggtatctctagtgttacacatggccttactaaagtttgggtaaataactatgatatctctattaattatagatgcatatatttcattcgtcaaggatattagtatcgacttgctatcgtcattaatacgtgtaatgtaatcatataaatcatgcgatagccaaggaaaatttaaatagatgttcatcatataatcgtcgctataattcatattaatacgttgacattgactaatttgtaatatagcctcgccacgaagaaagctctcgtattcagtttcatcgataaaggataccgttaaatataactggttgccgatagtctcatagtctattaagtggtaagtttcgtacaaatacagaatccctaaaatattatctaatgttggattaatctttaccataactgtataaaatggagacggagtcataactattttaccgtttgtacttactggaatagatgaaggaataatctccggacatgctggtaaagacccaaatgtctgtttgaagaaatccaatgttccaggtcctaatctcttaacaaaaattacgatattcgatcccgatatcctttgcattctatttaccagcatatcacgaactatattaagattatctatcatgtctattctcccaccgttatataaatcgcctccgctaagaaacgttagtatatccatacaatggaatacttcatttctaaaatagtattcgttttctaattctttaatgtgaaatcgtatactagaaagggaaaaattatctttgagttttccgttagaaaagaaccacgaaactaatgttctgattgcgtccgattccgttgctgaattaatggatttacaccaaaaactcatataacttctagatgtagaagcattcgctaaaaaattagtagaatcaaaggatataagtagatgttccaacaagtgagcaattcccaagatttcatctatatcattctcgaatccgaaattagaaattcccaagtagatatcctttttcatccgatcgttgatgaaaatacgaactttattcggtaagacaatcatttactaaggagtaaaataggaagtaatgttcgtatgtcgttatcatcgtataaattaaaggtgtgttttttaccattaagtgacattataattttaccaatattggaattataatataggtgtatttgcgcactcgcgacggttgatgcatcggtaaatatagctgtatctaatgttctagtcggtatttcatcatttcgctgtctaataatagcgttttctctatctgtttccattacagctgcctgaagtttattggtcggataatatgtaaaataataagaaatacatacgaataacaaaaataaaataagatataataaagatgccatttagagatctaattttgtttaacttgtccaaattcctacttacagaagatgaggaatcgttggagatagtgtcttccttatgtagaggatttgaaatatcttataatgacttgataacttactttccagataggaaataccataaatatatttataaagtatttgaacatgtagatttatcggaggaattaagtatggaattccatgatacaactctgagagatttagtctatcttagattgtacaagtattccaagtgtatacggccgtgttataaattaggagataatctaaaaggcatagttgttataaaggacaggaatatttatattagggaagcaaatgatgacttgatagaatatctcctcaaggaatacactcctcagatttatacatattctaatgagcgcgtccccataactggttcaaaattaattctttgtggattttctcaagttacatttatggcgtatacaacgtcgcatataacaacaaataaaaaggtagatgttctcgtttccaaaaaatgtatagatgaactagtcgatccaataaattatcaaatacttcaaaatttatttgataaaggaagcggaacaataaacaaaatactcaggaagatattttattcggtaacaggtggccaaactccataggtagctttttctatttcggattttagaatttccaaattcaccagcgatttatcggttttggtgaaatccaaggatttattaatgtccacaaatgccatttgttttgtctgtggattgtatttgaaaatggaaacgatgtagttagatagatgcgctgcgaagtttcctattagggttccgcgcttcacgtcacccagcatacttgaatcaccatcctttaaaaaaaatgataagatatcaacatggagtatatcatactcgaattttaattcttctactgactcactgacattttcacaaatactacaatacggtttaccgaaaataatcagtacgttcttcatttatgggtatcaaaaacttaaaatcgttactgctggaaaataaatcactgacgatattagatgataatttatacaaagtatacaatggaatatttgtggatacaatgagtatttatatagccgtcgccaattgtgtcagaaacttagaagagttaactacggtattcataaaatacgtaaacggatgggtaaaaaagggagggcatgtaaccctttttatcgatagaggaagtataaaaattaaacaagacgttagagacaagagacgtaaatattctaaattaaccaaggacagaaaaatgttagaattagaaaagtgtacatccgaaatacaaaatgttaccggatttatggaagaagaaataaaggcagaaatgcaattaaaaatcgataaactcacatttcaaatatatttatctgattctgataacataaaaatatcattgaatgagatactaacacatttcaacaataatgagaatgttacattattttattgtgatgaacgagacgcagaattcgttatgtgtctcgaggctaaaacacatttctctaccacaggagaatggccgttgataataagtaccgatcaggatactatgctatttgcatctgctgataatcatcctaagatgataaaaaacttaactcaactgtttaaatttgttccctcggcagaggataactatttagcaaaattaacggcgttagtgaatggatgtgatttctttcctggactctatggggcatctataacacccaccaacttaaacaaaatacaattgtttagtgattttacaatcgataatatagtcactagtttggcaattaaaaattattatagaaagactaactctaccgtagacgtgcgtaatattgttacgtttataaacgattacgctaatttagacgatgtctactcgtatattcctccttgtcaatgcactgttcaagaatttatattttccgcattagatgaaaaatggaatgaatttaaatcatcttatttagaaagcgtgccgttaccctgccaattaatgtacgcgttagaaccacgcaaggagattgatgtttcagaagttaaaactttatcatcttatatagatttcgaaaatactaaatcagatatcgatgttataaaatctatatcctcgatcttcggatattctaacgaaaactgtaacacgatagtattcggcatctataaggataatttactactgagtataaataattcattttactttaacgatagtctgttaataaccaatactaaaagtgataatataataaatataggttactagattaaaaatggtgttccaactcgtgtgctctacatgcggtaaagatatttctcacgaacgatataaattgattatacgaaaaaaatcattaaaggatgtactcgtcagtgtaaagaacgaatgttgtaggttaaaattatctacacaaatagaacctcaacgtaacttaacagtgcaacctctattggatataaactaatatggatccggttaattttatcaagacatatgcgcctagaggttctattatttttattaattataccatgtcattaacaagtcatttgaatccatcgatagaaaaacatgtgggtatttattatggtacgttattatcggaacacttggtagttgaatctacctatagaaaaggagttcgaatagtcccattggatagtttttttgaaggatatcttagtgcaaaagtatacatgttagagaatattcaagttatgaaaatagcagctgatacgtcattaactttattgggtattccgtatggatttggtcatgatagaatgtattgttttaaattggtagctgactgttataaaaatgccggtattgatacatcgtctaaacgaatattgggcaaagatatttttctgagccaaaacttcacagacgataatagatggataaagatatatgattctaataatttaacattttggcaaattgattaccttaaagggtgagttaatatgcataactactcctccgttgttttttccctcgttctttttcttaacgttgtttgccatcactctcataatgtaaagatattctaaaatggtaaacttttgcatatcggacgcagaaattggtataaatgttgtaattgtattatttcccgtcaatggactagtcacagctccatcagttttatatcctttagagtatttctcactcgtgtctaacattctagagcattccatgatctgtttatcgttgatattggccggaaagatagattttttattttttattatattactattggcaattgtagatataacttctggtaaatatttttctaccttttcaatctcttctattttcaagccggctatatattctgctatattgttgctagtatcaataccttttctggctaagaagtcatatgtggtattcactatatcagttttaactggtagttccattagcctttccacttctgcagaataatcagaaattggttctttaccagaaaatccagctactataataggctcaccgatgatcattggcaaaatcctatattgtaccagattaatgagagcatatttcatttccaataattctgctagttcttgagacattgatttatttgatgaatctagttggttctctagatactctaccatttctgccgcatacaataacttgttagataaaatcagggttatcaaagtgtttagcgtggctagaatagtgggcttgcatgtattaaagaatgcggtagtatgagtaaaccgttttaacgaattatatagtctccagaaatctgtggcgttacatacatgagccgaatgacatcgaagattgtccaatatttttaatagctgctctttgtccattatttctatatttgactcgcaacaattgtagataccattaatcaccgattcctttttcgatgccggacaatagcacaattgtttagctttggactctatgtattcagaattaatagatatatctctcaatacagattgcactatacattttgaaactatgtcaaaaattgtagaacgacgctgttctgcagccatttaactttaaataatttacaaaaatttaaaatgagcatccgtataaaaatcgataaactgcgccaaattgtggcatatttttcagagttcagtgaagaagtgtctataaatgtagactcgacggatgagttaatgtatatttttgccgccttgggcggatctgtaaacatttgggcaattatacctctaagtgcatcagtgttttaccgaggagccgaaaatattgtgtttaatcttcctgtgtccaaggtaaaatcgtgtttgtgtagttttcacaatgatgccatcatagatatagaacctgatctggaaaataatctagtaaaactttctagttatcatgtagtaagtgtcgattgtaacaaggaactgatgcctattaggacagatactactatttgtctaagtatagatcaaaagaaatcttacgtgtttaattttcacaagtatgaagaaaaatgttgtggtagaaccgtcattcatctagaatggttgttgggctttatcaagtgtattagtcagcatcagcatctggctattatgtttaaagatgacaatattattatgaagactcctggtaatactgatgcgttttccagggaatattctatgactgaatgttctcaagaactacaaaagttttctttcaaaatagctatctcgtctctcaacaaactacgaggattcaaaaagagagtcaatgtttttgaaactagaatcgtaatggataatgacgataacattttaggaatgttgttttcggatagagttcaatcctttaagatcaacatctttatggcgtttttagattaatactttcaatgagataaatatgggtggcggagtaagtgttgagctccctaaacgggatccgcctccgggagtacccactgatgagatgttattaaacgtggataaaatgcatgacgtgatagctcccgctaagcttttagaatatgtgcatataggaccactagcaaaagataaagaggataaagtaaagaaaagatatccagagtttagattagtcaacacaggacccggtggtctttcggcattgttaagacaatcgtataatggaaccgcacccaattgctgtcgcacttttaatcgtactcattattggaagaaggatggaaagatatcagataagtatgaagagggtgcagtattagaatcgtgttggccagacgttcacgacactggaaaatgcgatgttgatttattcgactggtgtcagggggatacgttcgatagaaacatatgccatcagtggatcggttcagcctttaataggagtaatagaactgtagagggtcaacaatcgttaataaatctgtataataagatgcaaacattatgtagtaaagatgctagtgtaccaatatgcgaatcatttttgcattatttacgcgcacacaatacagaagatagcaaagagatgatcgattatattctaagacaacagtctgcggactttaaacagaaatatatgagatgtagttatcccactagagataagttagaagagtcattaaaatatgcggaacctcgagaatgttgggatccagagtgttcgaatgccaatgttaatttcttactaacacgtaattataataatttaggactttgcaatattgtacgatgtaataccagcgtgaacaacttacagatggataaaacttcctcattaagattgtcatgtggattaagcaatagtgatagattttctactgttcccgtcaatagagcaaaagtagttcaacataatattaaacactcgttcgacctaaaattgcatttgatcagtttattatctctcttggtaatatggatactaattgtagctatttaaatgggtgccgcggcaagcatacagacgacggtgaatacactcagcgaacgtatctcgtctaaattagaacaagaagcgaacgctagtgctcaaacaaaatgtgatatagaaatcggaaatttttatatccgacaaaaccatggatgtaacctcactgttaaaaatatgtgctctgcggacgcggatgctcagttggatgctgtgttatcagccgctacagaaacatatagtggattaacaccggaacaaaaagcatacgtgccagctatgtttactgctgcgttaaacattcagacgagtgtaaacactgttgttagagattttgaaaattatgtgaaacagacttgtaattctagcgcggtcgtcgataacaaattaaagatacaaaacgtaatcatagatgaatgttacggagccccaggatctccaacaaatttggaatttattaatacaggatctagcaaaggaaattgtgccattaaagcgttgatgcaattgacgactaaggccactactcaaatagcacctagacaagttgctggtacaggagttcagttttatatgattgttatcggtgttataatattggcagcgttgtttatgtactatgccaagcgtatgttgttcacatccaccaatgataaaatcaaacttattttagccaataaggaaaacgtccattggactacttacatggacacattctttagaacttctccgatggttattgctaccacggatatgcaaaactgaaaatatattgataatattttaatagattaacatggaagttatcgctgatcgtctagacgatatagtgaaacaaaatatagcggatgaaaaatttgtagattttgttatacacggtctagagcatcaatgtcctgctatacttcgaccattaattaggttgtttattgatatactattatttgttatagtaatttatatttttacggtacgtctagtaagtagaaattatcaaatgttgttggtggtgctagtcatcacattaactattttttattactttatactataatagtactagactgacttctaacaaacatctcacctgccataaataaatgcttgatattaaagtcttctatttctaacactattccatctgtggaaaataatactctgacattatcgctaattgacacatcggtgagtgatatgcctataaagtaataatcttctttgggcacatataccagtgtaccaggttctaacaacctatttactggtgctcctgtagcatactttttctttaccttgagaatatccatcgtttgcttggtcaatagcgatatgtgattttttatcaaccactcaaaaaagtaattggagtgttcatatcctctacgggctattgtctcatggccgtgtatgaaatttaagtaacacgactgtggtagatttgttctatagagccgattgccgcaaatagatagaactaccaatatgtctgtacaaatgttaaacattaattgattaacagaaaaaacaatgttcgttctgggaatagaaaccagatcaaaacaaaattcgttagaatatatgccacgtttatacatggaatataaaataactacagtttgaaaaataacagtatcatttaaacatttaacttgcggggttaatctcacaactttactgtttttgaactgttcaaaatatagcatcgatccgtgagaaatacgtttagccgcctttaatagaggaaatcccaccgcctttctggatctcaccaacgacgatagttctgaccagcaactcatttcttcatcatccacctgttttaacatataataggcaggagatagatatccgtcattgcaatattccttctcgtaggcacacaatctaatattgataaaatctccattctcttctctgcatttattatcttgtctcggtggctgattaggctgtggtcttggtttaggccttggtctatcgttgttgaatctattttggtcattaaatctttcatttcttcctggtatatttctatcacctcgtttggttggatttttgtctatattatcgtttgtaacatcggtacgggtattcatttatcacaaaaaaaacttctctaaatgagtctactgctagaaaacctcatcgaagaagataccatattttttgcaggaagtatatctgagtatgatgatttacaaatggttattgccggcgcaaaatccaaatttccaagatctatgctttctatttttaatatagtacctagaacgatgtcaaaatatgagttggagttgattcataacgaaaatatcacaggagcaatgtttaccacaatgtataatataagaaacaatttgggtctaggagatgataaactaactattgaagccattgaaaactatttcttggatcctaacaatgaagttatgcctcttattattaataatacggatatgactgccgtcattcctaaaaaaagtggtaggagaaagaataagaacatggttatcttccgtcaaggatcatcacctatcttgtgcattttcgaaactcgtaaaaagattaatatttataaagaaaatatggaatccgcgtcgactgagtatacacctatcggagacaacaaggctttgatatctaaatatgcgggaattaatgtcctgaatgtgtattctccttccacatccataagattgaatgccatttacggattcaccaataaaaataaactagagaaacttagtactaataaggaactagaatcgtatagttctagccctcttcaagaacccattaggttaaatgattttctgggactattggaatgtgttaaaaagaatattcctctaacagatattccgacaaaggattgattactataaatggagaatgttcctaatgtatactttaatcctgtgtttatagagcccacgtttaaacattctttattaagtgtttataaacacagattaatagttttatttgaagtattcgttgtattcattctaatatatgtattttttagatctgaattaaatatgttcttcatgcctaaacgaaaaatacccgatcctattgatagattacgacgtgctaatctagcgtgtgaagacgataaattaatgatctatggattaccatggatgacaactcaaacatctgcgttatcaataaatagtaaaccgatagtgtataaagattgtgcaaagcttttgcgatcaataaatggatcacaaccagtatctcttaacgatgttcttcgcagatgatgattcattttttaagtatttggctagtcaagatgatgaatcttcattatctgatatattgcaaatcactcaatatctagactttctgttattattattgatccaatcaaaaaataaattagaagctgtgggtcattgttatgaatctctttcagaggaatacagacaattgacaaaattcacagactttcaagattttaaaaaactgtttaacaaggtccctattgttacagatggaagggtcaaacttaataaaggatatttgttcgactttgtgattagtttgatgcgattcaaaaaagaatcctctctagctaccaccgcaatagatcctgttagatacatagatcctcgtcgcaatatcgcattttctaacgtgatggatatattaaagtcgaataaagtgaacaataattaattctttattgtcatcatgaacggcggacatattcagttgataatcggccccatgttttcaggtaaaagtacagaattaattagacgagttagacgttatcaaatagctcaatataaatgcgtgactataaaatattctaacgataatagatacggaacgggactatggacgcatgataagaataattttgaagcattggaagcaactaaactatgtgatgtcttggaatcaattacagatttctccgtgataggtatcgatgaaggacagttctttccagacattgttgaattagatcgataaaaattaattaattacccgggtaccaggcctagatctgtcgagatccggtggtggtgcaaatcaaagaactgctcctcagtggatgttgcctttacttctaggcctgtacggaagtgttacttctgctctaaaagctgctgcagggggggggggggggtgggggggccggttagggccgccatcccctcagagcgtcgggatatcgggtggcggctcgggacggaggacgcgctagtgttcttctgtgtggcagttcagaatgatggatcaagctagatcagcattctctaacttgtttggtggagaaccattgtcatatacccggttcagcctggctcggcaagtagatggcgataacagtcatgtggagatgaaacttgctgtagatgaagaagaaaatgctgacaataacacaaaggccaatgtcacaaaaccaaaaaggtgtagtggaagtatctgctatgggactattgctgtgatcgtctttttcttgattggatttatgattggctacttgggctattgtaaaggggtagaaccaaaaactgagtgtgagagactggcaggaaccgagtctccagtgagggaggagccaggagaggacttccctgcagcacgtcgcttatattgggatgacctgaagagaaagttgtcggagaaactggacagcacagacttcaccagcaccatcaagctgctgaatgaaaattcatatgtccctcgtgaggctggatctcaaaaagatgaaaatcttgcgttgtatgttgaaaatcaatttcgtgaatttaaactcagcaaagtctggcgtgatcaacattttgttaagattcaggtcaaagacagcgctcaaaactcggtgatcatagttgataagaacggtagacttgtttacctggtggagaatcctgggggttatgtggcgtatagtaaggctgcaacagttactggtaaactggtccatgctaattttggtactaaaaaagattttgaggatttatacactcctgtgaatggatctatagtgattgtcagagcagggaaaatcacctttgcagaaaaggttgcaaatgctgaaagcttaaatgcaattggtgtgttgatatacatggaccagactaaatttcccattgttaacgcagaactttcattctttggacatgctcatctggggacaggtgacccttacacacctggattcccttccttcaatcacactcagtttccaccatctcggtcatcaggattgcctaatatacctgtccagacaatctccagagctgctgcagaaaagctgtttgggaatatggaaggagactgtccctctgactggaaaacagactctacatgtaggatggtaacctcagaaagcaagaatgtgaagctcactgtgagcaatgtgctgaaagagataaaaattcttaacatctttggagttattaaaggctttgtagaaccagatcactatgttgtagttggggcccagagagatgcatggggccctggagctgcaaaatccggtgtaggcacagctctcctattgaaacttgcccagatgttctcagatatggtcttaaaagatgggtttcagcccagcagaagcattatctttgccagttggagtgctggagactttggatcggttggtgccactgaatggctagagggatacctttcgtccctgcatttaaaggctttcacttatattaatctggataaagcggttcttggtaccagcaacttcaaggtttctgccagcccactgttgtatacgcttattgagaaaacaatgcaaaatgtgaagcatccggttactgggcaatttctatatcaggacagcaactgggccagcaaagttgagaaactcactttagacaatgctgctttccctttccttgcatattctggaatcccagcagtttctttctgtttttgcgaggacacagattatccttatttgggtaccaccatggacacctataaggaactgattgagaggattcctgagttgaacaaagtggcacgagcagctgcagaggtcgctggtcagttcgtgattaaactaacccatgatgttgaattgaacctggactatgagaggtacaacagccaactgctttcatttgtgagggatctgaaccaatacagagcagacataaaggaaatgggcctgagtttacagtggctgtattctgctcgtggagacttcttccgtgctacttccagactaacaacagatttcgggaatgctgagaaaacagacagatttgtcatgaagaaactcaatgatcgtgtcatgagagtggagtatcacttcctctctccctacgtatctccaaaagagtctcctttccgacatgtcttctggggctccggctctcacacgctgccagctttactggagaacttgaaactgcgtaaacaaaataacggtgcttttaatgaaacgctgttcagaaaccagttggctctagctacttggactattcagggagctgcaaatgccctctctggtgacgtttgggacattgacaatgagttttaaatgtgatacccatagcttccatgagaacagcagggtagtctggtttctagacttgtgctgatcgtgctaaattttcagtagggctacaaaacctgatgttaaaattccatcccatcatcttggtactactagatgtctttaggcagcagcttttaatacagggtagataacctgtacttcaagttaaagtgaataaccacttaaaaaatgtccatgatggaatattcccctatctctagaattttaagtgctttgtaatgggaactgcctctttcctgttgttgttaatgaaaatgtcagaaaccagttatgtgaatgatctctctgaatcctaagggctggtctctgctgaaggttgtaagtggtcgcttactttgagtgatcctccaacttcatttgatgctaaataggagataccaggttgaaagaccttctccaaatgagatctaagcctttccataaggaatgtagctggtttcctcattcctgaaagaaacagttaactttcagaagagatgggcttgttttcttgccaatgaggtctgaaatggaggtccttctgctggataaaatgaggttcaactgttgattgcaggaataaggccttaatatgttaacctcagtgtcatttatgaaaagaggggaccagaagccaaagacttagtatattttcttttcctctgtcccttcccccataagcctccatttagttctttgttatttttgtttcttccaaagcacattgaaagagaaccagtttcaggtgtttagttgcagactcagtttgtcagactttaaagaataatatgctgccaaattttggccaaagtgttaatcttaggggagagctttctgtccttttggcactgagatatttattgtttatttatcagtgacagagttcactataaatggtgtttttttaatagaatataattatcggaagcagtgccttccataattatgacagttatactgtcggttttttttaaataaaagcagcatctgctaataaaacccaacagatactggaagttttgcatttatggtcaacacttaagggttttagaaaacagccgtcagccaaatgtaattgaataaagttgaagctaagatttagagatgaattaaatttaattaggggttgctaagaagcgagcactgaccagataagaatgctggttttcctaaatgcagtgaattgtgaccaagttataaatcaatgtcacttaaaggctgtggtagtactcctgcaaaattttatagctcagtttatccaaggtgtaactctaattcccattttgcaaaatttccagtacctttgtcacaatcctaacacattatcgggagcagtatcttccataatgtataaagaacaaggtagtttttacctaccacagtgtctgtatcggagacagtgatctccatatgttacactaagggtgtaagtaattatcgggaacagtgtttcccataattttcttcatgcaatgacatcttcaaagcttgaagatcgttagtatctaacatgtatcccaactcctataattccctatcttttagttttagttgcagaaacattttgtggtcattaagcattgggtgggtaaattcaaccactgtaaaatgaaattactacaaaatttgaaatttagcttgggtttttgttacctttatggtttctccaggtcctctacttaatgagatagtagcatacatttataatgtttgctattgacaagtcattttaactttatcacattatttgcatgttacctcctataaacttagtgcggacaagttttaatccagaattgaccttttgacttaaagcagagggactttgtatagaaggtttgggggctgtggggaaggagagtcccctgaaggtctgacacgtctgcctacccattcgtggtgatcaattaaatgtaggtatgaataagttcgaagctccgtgagtgaaccatcattataaacgtgatgatcagctgtttgtcatagggcagttggaaacggcctcctagggaaaagttcatagggtctcttcaggttcttagtgtcacttacctagatttacagcctcacttgaatgtgtcactactcacagtctctttaatcttcagttttatctttaatctcctcttttatcttggactgacatttagcgtagctaagtgaaaaggtcatagctgagattcctggttcgggtgttacgcacacgtacttaaatgaaagcatgtggcatgttcatcgtataacacaatatgaatacagggcatgcattttgcagcagtgagtctcttcagaaaacccttttctacagttagggttgagttacttcctatcaagccagtacgtgctaacaggctcaatattcctgaatgaaatatcagactagtgacaagctcctggtcttgagatgtcttctcgttaaggagatgggccttttggaggtaaaggataaaatgaatgagttctgtcatgattcactattctagaacttgcatgacctttactgtgttagctctttgaatgttcttgaaattttagactttctttgtaaacaaatgatatgtccttatcattgtataaaagctgttatgtgcaacagtgtggagattccttgtctgatttaataaaatacttaaacactgaaaaaaaaaaaaaaaaaaaaaaaaaaaaaaaaaaaaaaaaaaaaaaaaaaaaaaaaaaaaaaaaaaaaaaaaaaaaaaaaagtaccttctgaggcggaaagaaccagccggatctcgacttcgagcttatttatattccaaaaaaaaaaaataaaatttcaatttttaagctttcactaattccaaacccacccgctttttatagtaagtttttcacccataaataataaatacaataattaatttctcgtaaaagtagaaaatatattctaatttattgcacggtaaggaagtagatcataactcgagcatgggagatcccgtcgttttacaacgtcgtgactgggaaaaccctggcgttacccaacttaatcgccttgcagcacatccccctttcgccagctggcgtaatagcgaagaggcccgcaccgatcgcccttcccaacagttgcgcagcctgaatggcgaatggcgctttgcctggtttccggcaccagaagcggtgccggaaagctggctggagtgcgatcttcctgaggccgatactgtcgtcgtcccctcaaactggcagatgcacggttacgatgcgcccatctacaccaacgtgacctatcccattacggtcaatccgccgtttgttcccacggagaatccgacgggttgttactcgctcacatttaatgttgatgaaagctggctacaggaaggccagacgcgaattatttttgatggcgttaactcggcgtttcatctgtggtgcaacgggcgctgggtcggttacggccaggacagtcgtttgccgtctgaatttgacctgagcgcatttttacgcgccggagaaaaccgcctcgcggtgatggtgctgcgctggagtgacggcagttatctggaagatcaggatatgtggcggatgagcggcattttccgtgacgtctcgttgctgcataaaccgactacacaaatcagcgatttccatgttgccactcgctttaatgatgatttcagccgcgctgtactggaggctgaagttcagatgtgcggcgagttgcgtgactacctacgggtaacagtttctttatggcagggtgaaacgcaggtcgccagcggcaccgcgcctttcggcggtgaaattatcgatgagcgtggtggttatgccgatcgcgtcacactacgtctgaacgtcgaaaacccgaaactgtggagcgccgaaatcccgaatctctatcgtgcggtggttgaactgcacaccgccgacggcacgctgattgaagcagaagcctgcgatgtcggtttccgcgaggtgcggattgaaaatggtctgctgctgctgaacggcaagccgttgctgattcgaggcgttaaccgtcacgagcatcatcctctgcatggtcaggtcatggatgagcagacgatggtgcaggatatcctgctgatgaagcagaacaactttaacgccgtgcgctgttcgcattatccgaaccatccgctgtggtacacgctgtgcgaccgctacggcctgtatgtggtggatgaagccaatattgaaacccacggcatggtgccaatgaatcgtctgaccgatgatccgcgctggctaccggcgatgagcgaacgcgtaacgcgaatggtgcagcgcgatcgtaatcacccgagtgtgatcatctggtcgctggggaatgaatcaggccacggcgctaatcacgacgcgctgtatcgctggatcaaatctgtcgatccttcccgcccggtgcagtatgaaggcggcggagccgacaccacggccaccgatattatttgcccgatgtacgcgcgcgtggatgaagaccagcccttcccggctgtgccgaaatggtccatcaaaaaatggctttcgctacctggagagacgcgcccgctgatcctttgcgaatacgcccacgcgatgggtaacagtcttggcggtttcgctaaatactggcaggcgtttcgtcagtatccccgtttacagggcggcttcgtctgggactgggtggatcagtcgctgattaaatatgatgaaaacggcaacccgtggtcggcttacggcggtgattttggcgatacgccgaacgatcgccagttctgtatgaacggtctggtctttgccgaccgcacgccgcatccagcgctgacggaagcaaaacaccagcagcagtttttccagttccgtttatccgggcaaaccatcgaagtgaccagcgaatacctgttccgtcatagcgataacgagctcctgcactggatggtggcgctggatggtaagccgctggcaagcggtgaagtgcctctggatgtcgctccacaaggtaaacagttgattgaactgcctgaactaccgcagccggagagcgccgggcaactctggctcacagtacgcgtagtgcaaccgaacgcgaccgcatggtcagaagccgggcacatcagcgcctggcagcagtggcgtctggcggaaaacctcagtgtgacgctccccgccgcgtcccacgccatcccgcatctgaccaccagcgaaatggatttttgcatcgagctgggtaataagcgttggcaatttaaccgccagtcaggctttctttcacagatgtggattggcgataaaaaacaactgctgacgccgctgcgcgatcagttcacccgtgcaccgctggataacgacattggcgtaagtgaagcgacccgcattgaccctaacgcctgggtcgaacgctggaaggcggcgggccattaccaggccgaagcagcgttgttgcagtgcacggcagatacacttgctgatgcggtgctgattacgaccgctcacgcgtggcagcatcaggggaaaaccttatttatcagccggaaaacctaccggattgatggtagtggtcaaatggcgattaccgttgatgttgaagtggcgagcgatacaccgcatccggcgcggattggcctgaactgccagctggcgcaggtagcagagcgggtaaactggctcggattagggccgcaagaaaactatcccgaccgccttactgccgcctgttttgaccgctgggatctgccattgtcagacatgtataccccgtacgtcttcccgagcgaaaacggtctgcgctgcgggacgcgcgaattgaattatggcccacaccagtggcgcggcgacttccagttcaacatcagccgctacagtcaacagcaactgatggaaaccagccatcgccatctgctgcacgcggaagaaggcacatggctgaatatcgacggtttccatatggggattggtggcgacgactcctggagcccgtcagtatcggcggaattccagctgagcgccggtcgctaccattaccagttggtctggtgtcaaaaataataataaccgggcaggggggatccaattctgtgagcgtatggcaaacgaaggaaaaatagttatagtagccgcactcgatgggacatttcaacgtaaaccgtttaataatattttgaatcttattccattatctgaaatggtggtaaaactaactgctgtgtgtatgaaatgctttaaggaggcttccttttctaaacgattgggtgaggaaaccgagatagaaataataggaggtaatgatatgtatcaatcggtgtgtagaaagtgttacatcgactcataatattatattttttatctaaaaaactaaaaataaacattgattaaattttaatataatacttaaaaatggatgttgtgtcgttagataaaccgtttatgtattttgaggaaattgataatgagttagattacgaaccagaaagtgcaaatgaggtcgcaaaaaaactgccgtatcaaggacagttaaaactattactaggagaattattttttcttagtaagttacagcgacacggtatattagatggtgccaccgtagtgtatataggatctgctcccggtacacatatacgttatttgagagatcatttctataatttaggagtgatcatcaaatggatgctaattgacggccgccatcatgatcctattttaaatggattgcgtgatgtgactctagtgactcggttcgttgatgaggaatatctacgatccatcaaaaaacaactgcatccttctaagattattttaatttctgatgtgagatccaaacgaggaggaaatgaacctagtacggcggatttactaagtaattacgctctacaaaatgtcatgattagtattttaaaccccgtggcgtctagtcttaaatggagatgcccgtttccagatcaatggatcaaggacttttatatcccacacggtaataaaatgttacaaccttttgctccttcatattcagctgaaatgagattattaagtatttataccggtgagaacatgagactgactcgagttaccaaattagacgctgtaaattatgaaaaaaagatgtactaccttaataagatcgtccgtaacaaagtagttgttaactttgattatcctaatcaggaatatgactattttcacatgtactttatgctgaggaccgtgtactgcaataaaacatttcctactactaaagcaaaggtactatttctacaacaatctatatttcgtttcttaaatattccaacaacatcaactgaaaaagttagtcatgaaccaatacaacgtaaaatatctagcaaaaattctatgtctaaaaacagaaatagcaagagatccgtacgcggtaataaatagaaacgtactactgagatatactaccgatatagagtataatgatttagttactttaataaccgttagacataaaattgattctatgaaaactgtgtttcaggtatttaacgaatcatccataaattatactccggttgatgatgattatggagaaccaatcattataacatcgtatcttcaaaaaggtcataacaagtttcctgtaaattttctatacatagatgtggtaatatctgacttatttcctagctttgttagactagatactacagaaactaatatagttaatagtgtactacaaacaggcgatggtaaaaagactcttcgtcttcccaaaatgttagagacggaaatagttgtcaagattctctatcgccctaatataccattaaaaattgttagatttttccgcaataacatggtaactggagtagagatagccgatagatctgttatttcagtcgctgattaatcaattagtagagatgagataagaacattataataatcaataatatatcttatatcttatatcttatatcttatatcttgtttagaaaaatgctaatattaaaatagctaacgctagtaatccaatcggaagccatttgatatctataatagggtatctaatttcctgatttaaatagcggacagctatattctcggtagctactcgtttggaatcacaaacattatttacatctaatttactatctgtaatggaaacgtttcccaatgaaatggtacaatccgatacattgcattttgttatatttttttttaaagaggctggtaacaacgcatcgcttcgtttacatggctcgtaccaacaataatagggtaatcttgtatctattcctatccgtactatgcttttatcaggataaatacatttacatcgtatatcgtctttgttagcatcacagaatgcataaatttgttcgtccgtcatgataaaaatttaaagtgtaaatataactattatttttatagttgtaataaaaagggaaatttgattgtatactttcggttctttaaaagaaactgacttgataaaaatggctgtaatctctaaggttacgtatagtctatatgatcaaaaagagattaatgctacagatattatcattagtcatgttaaaaatgacgacgatatcggtaccgttaaagatggtagactaggtgctatggatggggcattatgtaagacttgtgggaaaacggaattggaatgtttcggtcactggggtaaagtaagtatttataaaactcatatagttaagcctgaatttatttcagaaattattcgtttactgaatcatatatgtattcactgcggattattgcgttcacgagaaccgtattccgacgatattaacctaaaagagttatcgggacacgctcttaggagattaaaggataaaatattatccaagaaaaagtcatgttggaacagtgaatgtatgcaaccgtatcaaaaaattactttttcaaagaaaaaggtttgtttcgtcaacaagttggatgatattaacgttcctaattctctcatctatcaaaagttaatttctattcatgaaaagttttggccattattagaaattcatcaatatccagctaacttattttatacagactactttcccatccctccgttgattattagaccggctattagtttttggatagatagtatacccaaagagaccaatgaattaacttacttattaggtatgatcgttaagaattgtaacttgaatgctgatgaacaggttatccagaaggcggtaatagaatacgatgatattaaaattatttctaataacactaccagtatcaatttatcatatattacatccggcaaaaataatatgattagaagttatatcgtcgcccgacgaaaagatcagaccgctagatctgtaattggtcccagtacatctatcaccgttaatgaggtaggaatgcccgcatatattagaaatacacttacagaaaagatatttgttaatgcctttacagtggataaagttaaacaactattagcgtcaaaccaagttaaattttactttaataaacgattaaaccaattaacaagaatacgccaaggaaagtttattaaaaataaaatacatttattgcctggtgattgggtagaagtagctgttcaagaatatacaagtattatttttggaagacagccgtctctacatagatacaacgtcatcgcttcatctatcagagctaccgaaggagatactatcaaaatatctcccggaattgccaactctcaaaatgctgatttcgacggggatgaggaatggatgatattagaacaaaatcctaaagctgtaattgaacaaagtattcttatgtatccgacgacgttactcaaacacgatattcatggagcccccgtttatggatctattcaagatgaaatcgtagcagcgtattcattgtttaggatacaagatctttgtttagatgaagtattgaacatcttggggaaatatggaagagagttcgatcctaaaggtaaatgtaaattcagcggtaaagatatctatacttacttgataggtgaaaagattaattatccgggtctcttaaaggatggtgaaattattgcaaacgacgtagatagtaattttgttgtggctatgaggcatctgtcattggctggactcttatccgatcataagtcgaacgtggaaggtatcaactttattatcaagtcatcttatgtttttaagagatatctatctatttacggttttggggtgacattcaaagatctgagaccaaattcgacgttcactaataaattggaggccatcaacgtagaaaaaatagaacttatcaaagaagcatacgccaaatatctcaacgatgtaagagacgggaaaatagttccattatctaaagctttagaggcggactatgtggaatccatgttatccaacttgacaaatcttaatatccgagagatagaagaacatatgagacaaacgctgatagatgatccagataataacctcctgaaaatggccaaagcgggttataaagtaaatcccacagaactaatgtatattctaggtacgtatggacaacaaaggattgatggtgaaccagcagagactcgagtattgggtagagttttaccttactatcttccagactctaaggatccagaaggaagaggttacattcttaattctttaacaaaaggattaacgggttctcaatattacttttcgatgctggttgccagatctcaatctactgatatcgtctgtgaaacatcacgtaccggaacactggctagaaaaatcattaaaaagatggaggatatggtggtcgacggatacggacaagtagttataggtaatacgctcatcaagtacgccgccaattataccaaaattctaggctcagtatgtaaacctgtagatcttatctatccagatgagtccatgacttggtatttggaaattagtgctctgtggaataaaataaaacagggattcgtttactctcagaaacagaaacttgcaaagaagacattggcgccgtttaatttcctagtattcgtcaaacccaccactgaggataatgctattaaggttaaggatctgtacgatatgattcataacgtcattgatgatgtgagagagaaatacttctttacggtatctaatatagattttatggagtatatattcttgacgcatcttaatccttctagaattagaattacaaaagaaacggctatcactatctttgaaaagttctatgaaaaactcaattatactctaggtggtggaactcctattggaattatttctgcacaggtattgtctgagaagtttacacaacaagccctgtccagttttcacactactgaaaaaagtggtgccgtcaaacaaaaacttggtttcaacgagtttaataacttgactaatttgagtaagaataagaccgaaattatcactctggtatccgatgatatctctaaacttcaatctgttaagattaatttcgaatttgtatgtttgggagaattaaatccaaacatcactcttcgaaaagaaacagataaatatgtagtagatataatagtcaatagattatacatcaagagagcagaaataaccgaattagtcgtcgaatatatgattgaacgatttatctcctttagcgtcattgtaaaggaatggggtatggagacattcattgaggacgaggataatattagatttactgtctacctaaatttcgttgaaccggaagaattgaatcttagtaagtttatgatggttcttccgggggcagccaacaagggaaagattagtaaattcaagattcctatctctgattatacgggatatgacgacttcaatcaaacaaaaaagctcaataagatgactgtagaactcatgaatctaaaagaattgggttctttcgatttggaaaacgtcaacgtgtatcctggagtatggaatacatacgatatcttcggtatcgaggccgctcgtgaatacttgtgcgaagccatgttaaacacctatggagaagggttcgattatctgtatcagccttgtgatcttctcgctagtttactatgtgctagttacgaaccagaatcagtgaataaattcaagttcggcgcagctagtactcttaagagagctacgttcggagacaataaagcattgttaaacgcggctcttcataaaaagtcagaacctattaacgataatagtagctgccacttttttagcaaggtccctaatataggaactggatattacaaatactttatcgacttgggtcttctcatgagaatggaaaggaaactatctgataagatatcttctcaaaagatcaaggaaatggaagaaacagaagacttttaattcttatcaataacatatttttctatgatctgtcttttaaacgatggattttccacaaatgcgcctctcaagtccctcatagaatgatacacgtataaaaaatatagcataggcaatgactccttatttttagacattagatatgccaaaatcatagccccgcttctatttactcccgcagcacaatgaaccaacacgggctcgtttcgttgatcacatttagataaaaaggcggttacgtcgtcaaaatatttactaatatcggtagttgtatcatctaccaacggtatatgaataatattaatattagagttaggtaatgtatatttatccatcgtcaaatttaaaacatatttgaacttaacttcagatgatggtgcatccatagcatttttataatttcccaaatacacattattggttacccttgtcattatagtgggagatttggctttgtgcatatctccagttgaacgtagtagtaagtatttatacaaacttttcttatccatttataacgtacaaatggataaaactactttatcggtaaacgcgtgtaatttagaatacgttagagaaaaggctatagtaggcgtacaagcagccaaaacatcaacacttatattctttgttattatattggcaattagtgcgctattactctggtttcagacgtctgataatccagtctttaatgaattaacgagatatatgcgaattaaaaatacggttaacgattggaaatcattaacggatagcaaaacaaaattagaaagtgatagaggtagacttctagccgctggtaaggatgatatatttgaattcaaatgtgtggatttcggcgcctattttatagctatgcgattggataagaaaacatatctgccgcaagctattaggcgaggtactggagacgcgtggatggttaaaaaggcggcaaaggtcgatccatctgctcaacaattttgtcagtatttgataaaacacaagtctaataatgttattacttgtggtaatgagatgttaaatgaattaggttatagcggttattttatgtcaccgcattggtgttccgattttagtaatatggaatagtgttagataaatgcggtaacgaatgttcctgtaaggaaccataacagcttagatttaacgttaaagatgagcataaacataataaacaaaattacaatcaaacttataacattaatatcaaacaatccaaaaaatgaaatcagtggagtagtaaacgcgtacataactcctggataacgtttagcagctgccgttcctattctagaccaaaaattcggtttcatgttttcgaaacggtattctgcaacaagtcgaggatcgtgttctacatatttggcggcattatccagtatctgcctattgatcttcatttcgttttcgattctggctatttcaaaataaaatcccgatgatagacctccagactttataatttcatctacgatgttcagcgccgtagtaactctaataatataggctgataagctaacatcataccctcctgtatatgtgaatatggcatgatttttgtccattacaagctcggttttaactttattgcctgtaataatttctctcatctgtaggatatctatttttttgtcatgcattgccttcaagacgggacgaagaaacgtaatatcctcaataacgttatcgttttctacaataactacatattctacctttttattttctaactcggtaaaaaaattagaatcccatagggctaaatgtctagcgatatttcttttcgtttcctctgtacacatagtgttacaaaaccctgaaaagaagtgagtatacttgtcatcatttctaatgtttcctccagtccactgtataaacgcataatccttgtaatgatctggatcatccttgactaccacaacatttcttttttctggcataacttcgttgtcctttacatcatcgaacttctgatcattaatatgctcatgaacattaggaaatgtttctgatggaggtctatcaataactggcacaacaataacaggagttttcaccgccgccatttagttattgaaattaatcatatacaactctttaatacgagttatattttcgtctatccattgtttcacattgacatatttcgacaaaaagatataaaatgcgtattccaatgcttctctgtttaatgaattactaaaatatacaaacacgtcactgtctggcaataaatgatatcttagaatattgtaacaatttattttgtattgcacatgttcgtgatctatgagttcttcttcgaatggcataggatctccgaatctgaaaacgtataaataggagttagaataataatatttgagagtattggtaatatataaactctttagcggtataattagtttttttctctcaatttctatttttagatgtgatggaaaaatgactaattttgtagcattagtatcatgaactctaatcaaaatcttaatatcttcgtcacacgttagctctttgaagtttttaagagatgcatcagttggttctacagatggagtaggtgcaacaattttttgttctacacatgtatgtactggagccattgttttaactataatggtgcttgtatcgaaaaactttaatgcagatagcggaagctcttcgccgcgactttctacgtcgtaattgggttctaacgccgatctctgaatggatactagttttctaagttctaatgtgattctctgaaaatgtaaatccaattcctccggcattatagatgtgtatacatcggtaaataaaactatagtatccaacgatcccttctcgcaaattctagtcttaaccaaaaaatcgtatataaccacggagatggcgtatttaagagtggattcttctaccgttttgttcttggatgtcatataggaaactataaagtccgcactactgttaagaatgattactaacgcaactatatagtttaaattaagcattttggaaacataaaataactctgtagacgatacttgactttcgaataagtttgcagacaaacgaagaaagaacagacctctcttaatttcagaagaaaactttttttcgtattcctgacgtctagagtttatatcaataagaaagttaagaattagtcggttaatgttgtatttcattacccaagtttgagatttcataatattatcaaaagacatgataatattaaagataaagcgctgactatgaacgaaatagctatatggttcgctcaagaatatagtcttgttaaacgtggaaacgataactgtatttttaatcacgtcagcggcatctaaattaaatataggtatatttattccacacactctacaatatgccacaccatcttcataataaataaattcgttagcaaaattattaattttagtgaaatagttagcgtcaactttcatagcttccttcaatctaatttgatgctcacacggtgcgaattccactctaacatcccttttccatgcctcaggttcatcgatctctataatatctagttttttgcgtttcacaaacacaggctcgtctctcgcgatgagatctgtatagtaactatgtaaatgataactagatagaaagatgtagctatatagatgacgatcctttaagagaggtataataactttaccccaatcagatagactgttgttatggtcttcggaaaaagaatttttataaatttttccagtattttccaaatatacgtacttaacatctaaaaaatccttaatgataataggaatggataatccgtctattttataaagaaatacatatcgcacattatacttttttttggaaatgggaataccgatgtgtctacataaatatgcaaagtctaaatattttttagagaatcttagttggtccaaattcttttccaagtacggtaatagatttttcatattgaacggtatcttcttaatctctggttctagttccgcattaaatgatgaaactaagtcactatttttataactaacgattacatcacctctaacatcatcatttaccagaatactgatcttcttttgtcgtaaatacatgtctaatgtgttaaaaaaaagatcatacaagttatacgtcatttcatctgtggtattcttgtcattgaaggataaactcgtactaatctcttctttaacagcctgttcaaatttatatcctatatacgaaaaaatagcaaccagtgtttgatcatccgcgtcaatattctgttctatcgtagtgtataacaatcgtatatcttcttctgtgatagtcgatacgttataaaggttgataacgaaaatatttttatttcgtgaaataaagtcatcgtaggattttggacttatattcgcgtctagtagatatgcttttatttttggaatgatctcaattagaatagtctctttagagtccatttaaagttacaaacaactaggaaattggtttatgatgtataatttttttagtttttatagattctttattctatacttaaaaaatgaaaataaatacaaaggttcttgagggttgtgttaaattgaaagcgagaaataatcataaattatttcattatcgcgatatccgttaagtttgtatcgtaatggcgtggtcaattacgaataaagcggatactagtagcttcacaaagatggctgaaatcagagctcatctaaaaaatagcgctgaaaataaagataaaaacgaggatattttcccggaagatgtaataattccatctactaagcccaaaaccaaacgagccactactcctcgtaaaccagcggctactaaaagatcaaccaaaaaggaggaagtggaagaagaagtagttatagaggaatatcatcaaacaactgaaaaaaattctccatctcctggagtcagcgacattgtagaaagcgtggccgctgtagagctcgatgatagcgacggggatgatgaacctatggtacaagttgaagctggtaaagtaaatcatagtgctagaagcgatctctctgacctaaaggtggctaccgacaatatcgttaaagatcttaagaaaattattactagaatctctgcagtatcgacggttctagaggatgttcaagcagctggtatctctagacaatttacttctatgactaaagctattacaacactatctgatctagtcaccgagggaaaatctaaagttgttcgtaaaaaagttaaaacttgtaagaagtaaatgcgtgcacttttttataaagatggtaaactctttaccgataataattttttaaatcctgtatcagacgataatccagcgtatgaggttttgcaacatgttaaaattcctactcatttaacagatgtagtagtatatgaacaaacgtgggaggaggcgttaactagattaatttttgtgggaagtgattcaaaaggacgtagacaatacttttacggaaaaatgcatgtacagaatcgcaacgctaaaagagatcgtatttttgttagagtatataacgttatgaaacgaattaattgttttataaacaaaaatataaagaaatcgtccacagattccaattatcagttggcggtttttatgttaatggaaactatgttttttattagatttggtaaaatgaaatatcttaaggagaatgaaacagtagggttattaacactaaaaaataaacacatagaaataagtcccgatgaaatagttatcaagtttgtaggaaaggacaaagtttcacatgaatttgttgttcataagtctaatagactatataaaccgctattgaaactgacggatgattctagtcccgaagaatttctgttcaacaaactaagtgaacgaaaggtatacgaatgtatcaaacagtttggtattagaatcaaggatctccgaacgtatggagtcaattatacgtttttatataatttttggacaaatgtaaagtccatatctcctcttccgtcaccaaaaaagttaatagcattaactatcaaacaaactgctgaagtggtaggtcatactccatcaatttcaaaaagagcttatatggcaacgactattttagaaatggtaaaggataaaaattttttagatgtagtatctaaaactacgttcgatgaattcctatctatagtcgtagatcacgttaaatcatctacggatggatgatatagatctttacacaaataattacaagaccgataaatggaaatggataagcgtatgaaatctctcgcaatgacagctttcttcggagagctaagcacattagatattatggcattgataatgtctatatttaaacgccatccaaacaataccattttttcagtggataaggatggtcagtttatgattgatttcgaatacgataattataaggcttctcaatatttggatctgaccctcactccgatatctggagatgaatgcaagactcacgcatcgagtatagccgaacaattggcgtgtgcggatattattaaagaggatattagcgaatatatcaaaactactccccgtcttaaacgatttataaaaaaataccgcaatagatcagatactcgtatcagtcgagatacagaaaagcttaaaatagctctagctaaaggcatagattacgaatatataaaagacgcttgttaataagtaaatgaaaaaaaactagtcgtttataataaaacacgatatggatgccaacgtagtatcattttctactattgcgacgtatatagacgctttagcgaagaatgcttcggaattagaacagaggtctaccgcatacgaaataaataatgaattggaactagtatttattaagccgccattgattactttgacaaatgtagtgaatatctctacgattcaggaatcgtttattcgatttaccgttactaataaggaaggtgttaaaattagaactaagattccattatctaaggtacatggtctagatgtaaaaaatgtacagttagtagatgctatagataacatagtttgggaaaagaaatcattagtgacggaaaatcgtcttcacaaagaatgcttgttgagactatcgacagaggaacgtcatatatttttggattacaagaaatatggatcctctatccgactagaattagtcaatcttattcaagcaaaaacaaaaaactttacgatagactttaagctaaaatattttctaggatccggtgcccagtctaaaagttctttgttgcacgctattaatcatccaaagtcaaggcctaatacatctctggaaatagaattcacacctagagacaatgaaacagttccatatgatgaactaataaaggaattgacgactctctcgcgtcatatatttatggcttctccagagaatgtaattctttctccgcctattaacgcgcctataaaaacctttatgttgcctaaacaagatatagtaggtttggatctggaaaatctatatgccgtaactaagactgacggcattcctataactatcagagttacatcaaacgggttgtattgttattttacacatcttggttatattattagatatcctgttaagagaataatagattccgaagtagtagtctttggtgaggcagttaaggataagaactggaccgtatatctcattaagctaatagagcctgtgaatgcaatcaatgatagactagaagaaagtaagtatgttgaatctaaactagtggatatttgtgatcggatagtattcaagtcaaagaaatacgaaggtccgtttactacaactagtgaagtcgtcgatatgttatctacatatttaccaaagcaaccagaaggtgttattctgttctattcaaagggacctaaatctaacattgattttaaaattaaaaaggaaaatactatagaccaaactgcaaatgtagtatttaggtacatgtccagtgaaccaattatctttggagaatcgtctatctttgtagagtataagaaatttagcaacgataaaggctttcctaaagaatatggttctggtaagattgtgttatataacggcgttaattatctaaataatatctattgtttggaatatattaatacacataatgaagtgggtattaagtccgtggttgtacctattaagtttatagcagaattcttagttaatggagaaatacttaaacctagaattgataaaaccatgaaatatattaactcagaagattattatggaaatcaacataatatcatagtcgaacatttaagagatcaaagcatcaaaataggagatatctttaacgaggataaactatcggatgtgggacatcaatacgccaataatgataaatttagattaaatccagaagttagttattttacgaataaacgaactagaggaccgttgggaattttatcaaactacgtcaagactcttcttatttctatgtattgttccaaaacatttttagacgattccaacaaacgaaaggtattggcgattgattttggaaacggtgctgacctggaaaaatacttttatggagagattgcgttattggtagcgacggatccggatgctgatgctatagctagaggaaatgaaagatacaacaaattaaactctggaattaaaaccaagtactacaaatttgactacattcaggaaactattcgatccgatacatttgtctctagtgtcagagaagtattctattttggaaagtttaatatcatcgactggcagtttgctatccattattcttttcatccgagacattatgctaccgtcatgaataacttatccgaactaactgcttctggaggcaaggtattaatcactaccatggacggagacaaattatcaaaattaacagataaaaagacttttataattcataagaatttacctagtagcgaaaactatatgtctgtagaaaaaatagctgatgatagaatagtggtatataatccatcaacaatgtctactccaatgactgaatacattatcaaaaagaacgatatagtcagagtgtttaacgaatacggatttgttcttgtagataacgttgatttcgctacaattatagaacgaagtaaaaagtttattaatggcgcatctacaatggaagatagaccgtctacaaaaaactttttcgaactaaatagaggagccattaaatgtgaaggtttagatgtcgaagacttacttagttactatgttgtttatgtcttttctaagcggtaaataataatatggtatgggttctgatctcccagttctaaatgcattaaataattccaatagagcgatttttgttcctataggaccttccaactgtggatactctgtattgttaatagatatattaatacttttgtcgggtaacagaggttctacgtcttctaaaaataaaagttttataacatctggcctgttcataaataaaaacttggcgattctatatatactcttattatcaaatctagccattgtcttatagatgtgagctactgtaggtgtaccatttgattttctttctaatactatatatttctctcgaagaagttcttgcacatcatctgggaataaaatactactgttgagtaaatcagttattttttttatatcgatattgatggacatttttatagttaaggataataagtatcccaaagtcgataacgacgataacgaagtatttatacttttaggaaatcacaatgactttatcagattaaaattaacaaaattaaaggagcatgtatttttttctgaatatattgtgactccagatacatatggatctttatgcgtcgaattaaatgggtctagttttcagcacggcggtagatatatagaggtggaggaatttatagatgctggaagacaagttagatggtgttctacatccaatcatatatctaaagatatacccgaagatatgcacactgataaatttgtcatttatgatatttatacgtttgattcgttcaagaataaacgattggtattcgtacaggtacctccgtcgttaggagatgatagtcatttgactaatccgttattgtcaccgtattatcgtaattcagtagccagacaaatggtcaatgatatgatttttaatcaagattcatttttaaaatatttattagaacatctgattagaagccactatagagtttctaaacatataacaatagttagatacaaggataccgaagaattaaatctaacgagaatatgttataatagagataagtttaaggcgtttgtattcgcttggtttaacggcgtttcggaaaatgaaaaggtactagatacgtataaaaaggtatctaatttgatataatgaattcagtgactgtatcacacgcgccatatactattacttatcacgatgattgggaaccagtaatgagtcaattggtagagttttataacgaagtagccagttggctgctacgagacgagacgtcgcctattcctgataagttctttatacagttgaaacaaccgcttagaaataaacgagtatgtgtgtgtggtatagatccgtatccgaaagatggaactggtgtaccgttcgaatcaccaaattttacaaaaaaatcaattaaggagatagcttcatctatatctagattaaccggagtaattgattataaaggttataaccttaatataatagacggggttataccctggaattattacttaagttgtaaattaggagaaacaaaaagtcacgcgatttactgggataagatttccaagttactgctgcagcatataactaaacacgttagtgttctttattgtttgggtaaaacagatttctcgaatatacgggccaagttagaatccccggtaactaccatagtcggatatcatccagcggctagagaccgccaattcgagaaagatagatcatttgaaattatcaacgttttactggaattagacaacaaggcacctataaattgggctcaagggtttatttattaatgctttagtgaaattttaacttgtgttctaaatggatgcggctattagaggtaatgatgttatctttgttcttaagactataggtgtcccgtcagcgtgcagacaaaatgaagatccaagatttgtagaagcatttaaatgcgacgagttagaaagatatattgagaataatccagaatgtacactattcgaaagtcttagggatgaggaagcatactctatagtcagaattttcatggatgtagatttagacgcgtgtctagacgaaatagattatttaacggccattcaagattttattatcgaggtgtcaaactgtgtagctagattcgcgtttacagaatgcggcgccattcatgaaaatgtaataaaatccatgagatctaatttttcattgactaagtctacaaatagagataaaacaagttttcatattatctttttagatacgtataccactatggatacattgatagctatgaaacgaacactattagaattaagtagatcatctgaaaatccactaaccagatcgatagacactgccgtatataggagaaaaacaactcttcgggttgtaggtactaggaaaaatccaaattgcgacactattcatgtaatgcaaccaccgcatgataatatagaagattacctattcacttacgtggatatgaacaacaatagttattacttttctctacaacaacgattggaggatttagttcctgataagttatgggaaccagggtttatttcattcgaagacgctataaaaagagtttcaaaaatattcattaattctataataaactttaatgatctcgatgaaaataattttacaacggtaccactggtcatagattacgtaacaccttgtgcattatgtaaaaaacgatcgcataaacatccgcatcaactatcgttggaaaatggtgctattagaatttacaaaactggtaatccacatagttgtaaagttaaaattgttccgttggatggtaataaactgtttaatattgcacaaagaattttagacactaactctgttttattaaccgaacgaggagaccatatagtttggattaataattcatggaaatttaacagcgaagaacccttgataacaaaactaattttgtcaataagacatcaactacctaaggaatattcaagcgaattactctgtccaagaaaacgaaagactgtagaagctaacatacgagacatgttagtagattcagtggagaccgatacctatccggataaacttccgtttaaaaatggtgtattggacctggtagacggaatgttttactctggagatgatgctaaaaaatatacgtgtactgtatcaaccggatttaaatttgacgatacaaagttcgtcgaagacagtccagaaatggaagagttaatgaatatcattaacgatatccaaccattaacggatgaaaataagaaaaatagagagctatatgaaaaaacattatctagttgtttatgcggtgctaccaaaggatgtttaacattcttttttggagaaactgcaactggaaagtcgacaaccaaacgtttgttaaagtctgctatcggtgacctgtttgttgagacgggtcaaacaattttaacagatgtattggataaaggacctaatccatttatcgctaacatgcatttgaaaagatctgtattctgtagcgaactacctgattttgcctgtagtggatcaaagaaaattagatctgacaatattaaaaagttgacagaaccttgtgtcattggaagaccgtgtttctccaataaaattaataatagaaaccatgcgacaatcattatcgatactaattacaaacctgtttttgataggatagataacgcattaatgagaagaattgccgtcgtgcgattcagaacacacttttctcaaccttctggtagagaggctgctgaaaataatgacgcgtacgataaagtcaaactattagacgaggggttagatggtaaaatacaaaataatatatatagatttgcatttctatacttgttggtgaaatggtacaaaaaatatcatgttcctattatgaaactatatcctacacccgaagagattcctgactttgcattctatctcaaaataggtactctgttggtatctagctctgtaaagcatattccattaatgacggacctctccaaaaagggatatatattgtacgataatgtggtcactcttccgttgactactttccaacagaaaatatccaagtattttaattctagactatttggacacgatatagagagcttcatcaatagacataagaaatttgccaatgttagtgatgaatatctgcaatatatattcatagaggatatttcatctccgtaaatatatgctcatatatttatagaagatatcacatatctaaatgaataccggaatcatagatttatttgataatcatgttgatagtataccaactatattacctcatcagttagctactctagattatctagttagaactatcatagatgagaacagaagcgtgttattgttccatattatgggatcaggtaaaacaataatcgctttgttgttcgccttggtagcttccagatttaaaaaggtttacattctagtgccgaacatcaacatcttaaaaattttcaattataatatgggtgtagctatgaacttgtttaatgacgaattcatagctgagaatatctttattcattccacaacaagtttttattctcttaattataacgataacgtcattaattataacggattatctcgctacaataactctatttttatcgttgatgaggcacataatatctttgggaataatactggagaacttatgaccgtgataaaaaataaaaacaagattccttttttactattgtctggatctcccattactaacacacctaatactctgggtcatattatagatttaatgtccgaagagacgatagattttggtgaaattattagtcgtggtaagaaagtaattcagacacttcttaacgaacgcggtgtgaatgtacttaaggatttgcttaaaggaagaatatcatattacgaaatgcctgataaagatctaccaacgataagatatcacggacgtaagtttctagatactagagtagtatattgtcacatgtctaaacttcaagagagagattatatgattactagacgacagctatgttatcatgaaatgtttgataaaaatatgtataacgtgtcaatggcagtattgggacaacttaatctgatgaataatttagatactttatttcaggaacaggataaggaattgtacccaaatctgaaaataaataatggcgtgttatacggagaagaattggtaacgttaaacattagttccaaatttaaatactttattaatcggatacagacactcaacggaaaacattttatatacttttctaattctacatatggcggattggtaattaaatatatcatgctcagtaatggatattctgaatataatggttctcagggaactaatccacatatgataaacggcaaaccaaaaacatttgctatcgttactagtaaaatgaaatcgtctttagaggatctattagatgtgtataattctcctgaaaacgatgatggtagtcaattgatgtttttgttttcatcaaacattatgtccgaatcctatactctaaaagaggtaaggcatatttggtttatgactatcccagatactttttctcaatacaaccaaattcttggacgatctattagaaaattctcttacgccgatatttctgaaccagttaatgtatatcttttagccgccgtatattccgatttcaatgacgaagtgacgtcattaaacgattacacacaggatgaattaattaatgttttaccatttgacatcaaaaagctgttgtatctaaaatttaagacgaaagaaacgaatagaatatactctattcttcaagagatgtctgaaacgtattctcttccaccacatccatcaattgtaaaagttttattgggagaattggtcagacaatttttttataataattctcgtattaagtataacgataccaagttacttaaaatggttacatcagttataaaaaataaagaagacgctaggaattacatagatgatattgtaaacggtcacttctttgtatcgaataaagtatttgataaatctcttttatacaaatacgaaaacgatattattacagtaccgtttagactttcctacgaaccatttgtttggggagttaactttcgtaaagaatataacgtggtatcttctccataaaactgatgagatatataaagaaataaatgtcgagctttgttaccaatggatacctttccgttacattggaaccacacgagctgacgttagacataaaaactaatattaggaatgccgtatataagacgtatctccatagagaaattagtggtaaaatggccaagaaaatagaaattcgtgaagacgtggaattacctctcggcgaaatagttaataattctgtagttataaacgttccgtgtgtaataacctacgcgtattatcacgttggggatatagtcagaggaacattaaacatcgaagatgaatcaaatgtaactattcaatgtggagatttaatctgtaaactaagtagagattcgggtactgtatcatttagcgattcaaagtactgcttttttcgaaatggtaatgcgtatgacaatggcagcgaagtcactgccgttctaatggaggctcaacaaggtatcgaatctagttttgtttttctcgcgaatatcgtcgactcataaaaaagagaatagcggtaagtataaacacgaatactatggcaataattgcgaatgttttattctcttcgatatatttttgataatatgaaaaacatgtctctctcaaatcggacaaccatctcataaaatagttctcgcgcgctggagaggtagttgccgctcgtataatctctccagaataatatacttgcgtgtcgtcgttcaatttatacggatttctatagttctctgttatataatgcggtttgccctcatgattagacgacgacaatagtgttctaaatttagatagttgatcagaatgaatgtttattggcgttggaaaaattatccatacagcgtctgcagagtggttgatagttgttcctagatatgtaaaataatccaacttactaggcagcaaattgtctagataaaatactgaatcaaacggtgcagacgtattggcggatctaatggaatccaattgattaactatcttttgaaaatatacatttttatgatccaatacttgtaagaatatagaaataatgataagtccatcatcgtgtttttttgcctcttcataagaactatattttttcttattccaatgaacaagattaatctctccagagtatttgtacacatctatcaagtgattggatccataatcgtcttcctttccccaatatatatgtagtgatgataacacatattcattggggagaaaccctccacttatatatcctcctttaaaattaatccttactagttttccagtgttctggatagtggttggtttcgactcattataatgtatgtctaacggcttcaatcgcgcgttagaaattgcttttttagtttctatattaataggagatagttgttgcggcatagtaaaaatgaaatgataactgtttaaaaatagctcttagtatgggaattacaatggatgaggaagtgatatttgaaactcctagagaattaatatctattaaacgaataaaagatattccaagatcaaaagacacgcatgtgtttgctgcgtgtataacaagtgacggatatccgttaataggagctagaagaacttcattcgcgttccaggcgatattatctcaacaaaattcagattctatctttagagtatccactaaactattacggtttatgtactacaatgaactaagagaaatctttagacggttgagaaaaggttctatcaacaatatcgatcctcactttgaagagttaatattattgggtggtaaactagataaaaaggaatctattaaagattgtttaagaagagaattaaaagaggaaagtgatgaacgtataacagtaaaagaatttggaaatgtaattctaaaacttacaacacgggataaattatttaataaagtatatataagttattgcatggcgtgttttattaatcaatcgttggaggatttatcgcatactagtatttacaatgtagaaattagaaagattaaatcattaaatgattgtattaacgacgataaatacgaatatctgtcttatatttataatatgctagttaatagtaaatgaacttttacagatctagtataattagtcagattattaagtataatagacgactagctaagtctattatttgcgaggatgactctcaaattattacactcacggcattcgttaaccaatgcctatggtgtcataaacgagtatccgtgtccgctattttattaactactgataacaaaatattagtatgtaacagacgagatagttttctctattctgaaataattagaactagaaacatgtttagaaagaaacgattatttctgaattattccaattatttgaacaaacaggaaagaagtatactatcgtcatttttttctctagatccagctactactgataatgatagaatagacgctatttatccgggtggcatacccaaaaggggtgagaatgttccagagtgtttatccagggaaattaaagaagaagttaatatagacaattcttttgtattcatagacactcggttttttattcatggcatcatagaagataccattattaataaattttttgaggtaatcttctttgtcggaagaatatctctaacgagtgatcaaatcattgatacatttaaaagtaatcatgaaatcaaggatctaatatttttagatccgaattcaggtaatggactccaatacgaaattgcaaaatatgctctagatactgcaaaacttaaatgttacggccatagaggatgttattatgaatcattaaaaaaattaactgaggatgattgattaaaaaatataaattaatttaccatcgtgtatttttataacgggattgtccggcatatcatgtagatagttaccgtctacatcgtatactcgaccatctacgcctttaaatcctctatttattgacattaatctattagaattggaataccaaatattagtaccctcaattagtttattggtaatattttttttagacgatagatcgatggctcttgaaaccaaggttttccaaccggactcattgtcgatcggtgagaagtctttttcattagcatgaatccattctaatgatgtatgtttaaacactctaaacaattggacaaattcttttgatttgctttgaatgatttcaaataggtcttcgtctacagtaggcataccattagataatctagccattataaagtgcacgtttacatatctacgttctggaggagtaagaacgtgactattgagacgaatggctcttcctactatctgacgaagagacgcctcgttccatgtcatatctaaaatgaagatatcattaattgagaaaaaactaataccctcgcctccactagaagagaatacgcatgttttaatgcattctccgttagtgtttgattcttggttaaactcagccaccgccttgattctagtatcttttgttctagatgagaactctatattagagataccaaagactttgaaatatagtaataagatttctattcctgactgattaacaaatggttcaaagactagacatttaccatgggatgctaatattcccaaacatacatctataaatttgacgcttttctcttttaattcagtaaatagagagatatcagccgcactagcatcccctttcaatagttctccctttttaaaggtatctaatgcggatttagaaaactctctatctcttaatgaatttttaaaatcattatatagtgttgctatctcttgcgcgtattcgcccggatcacgattttgtctttcaggaaagctatcgaacgtaaacgtagtagccatacgtctcagaattctaaatgatgatatacctgtttttatttcagcgagtttagccttttgataaatttcttcttgctttttcgacatattaacgtatcgcattaatactgttttcttagcgaatgatgcagacccttctacgtcatcaaaaatagaaaactcgttattaactatatacgaacatagtcctcctagtttggagactaattctttttcatcgactagacgtttattctcaaatagcgattggtgttgtaaggatcctggtcgtagtaagttaaccaacatggtgaattcttgcacactattgacgataggtgtagccgataaacaaatcatcttatggttttttaacgcaatggtcttagataaaaaattatatactgaacgagtaggacggatcttaccatcttctttgattaatgatttagaaatgaagttatgacattcatcaataatgacgcatattctactcttggaattaatagttttgatattagtaaaaaatttatttctaaaattttgatcatcgtaattaataaaaatacaatccttcgttatctctggagcgtatctgagtatagtgttcatccaaggatcttctatcaaagcctttttcaccaataagataatagcccaattcgtataaatatccttaagatgtttgagaatatatacagtagtcattgttttaccgacacccgtttcatggaacaataaaagagaatgcatactgtctaatcctaagaaaactcttgctacaaaatgttgataatccttgaggcgtactacgtccgaccccatcatttcaacgggcatattagtagttctgcgtaaggcataatcgatataggccgcgtgtgatttactcatttatgagtgataagtaataactatgttttaaaaatcacagcagtagtttaactagtcttctctgatgtttgttttcgatactttttgaatcagaagtcatactagaataaagcaacgagtgaacgtaatagagagcttcgtatactctattcgaaaactctaagaacttattaatgaattccgtatccactggattgtttaaaatactaaattgaacactgttcacatccttccaagaagaagacttagtgacggacttaacatgagacataaataaatccaaattttttttacaaacatcactagccaccataatggcgctatctttcaaccagctatcgcttacgcattttagcagtctaacatttttaaagagactacaatatattctcatagtatcgattacacctctaccgaataaagttggaagtttaataatacaatatttttcgtttacaaaatcaaataatggtcgaaacacgtcgaaggttaacatcttataatcgctaatgtatagattgttttcagtgagatgattattagatttaatagcatctcgttcacgtttgaacagtttattgcgtgcgctgaggtcggcaactacggcgtccgctttagtactcctcccataatactttacgctattaatctttaaaatttcatagactttatctagatcgctttctggtaacatgatatcatgtgtaaaaagttttaacatgtcggtcggcattctatttagatcattaactctagaaatctgaagaaagtaattagctccgtattccagactaggtaatgggcttttacctagagacagattaagttctggcaatgtttcataaaatggaagaaggacatgcgttccctcccggatattttttacaatttcatccatttacaactctatagtttgttttcattattattagttattatctcccataatcttggtaatacttaccccttgatcgtaagataccttatacaggtcattacatacaactaccaattgtttttgtacataatagattggatggttgacatccatggtggaataaactactcgaacagatagtttatctttccccctagatacattagccgtaatagttgtcggcctaaagaatatctttggtgtaaagttaaaagttagggttcttgttccattattgctttttgtcagtagttcattataaattctcgagatgggtccgttctctgaatatagaacatcatttccaaatctaacttctagtctagaaataatatcggtcttattcttaaaatctattcccttgatgaagggatcgttaatgaacaaatccttggcctttgattcggctgatctattatctccgttatagacgttacgttgactagtccaaagacttacaggaatagatgtatcgatgatgttgatactatgtgatatgtgagcaaagattgttctcttagtggcatcactatatgttccagtaatggcggaaaactttttagaaatgttatatataaaagaattttttcgtgttccaaacattagcagattagtatgaagataaacactcatattatcaggaacattatcaatttttacatacacatcagcatcttgaatagaaacgataccatcttctggaacctctacgatctcggcagactccggataaccagtcggtgggccatcgctaacaataactagatcatccaacaatctactcacatatgcatctatataatctttttcatcttgtgagtaccctggatacgaaataaatttattatccgtatttccataataaggtttagtataaacagagagagatgttgccgcatgaacttcagttacagtcgccgttggttggtttatttgacctattactctcctaggtttctctataaacgatggtttaatttgtacattcttaaccatatatccaataaagctcaattcaggaacataaacaaattctttgttgaacgtttcaaagtcgaacgaagagtcacgaataacgatatcggatactggattgaaggttaccgttacggtaatttttgaatcggatagtttaagactgctgaatgtatcttccacatcaaacggagttttaatataaacgtatactgtagatggttctttaatagtgtcattaggagttaggccaatagaaatatcattaagttcactagaatatccagagtgtttcaaagcaattgtattattgatacaattattatataattcttcgccctcaatttcccaaataacaccgttacacgaagagatagatacgtgattaatacatttatatccaacatatggtacgtaactgaatcttcccatacctttaacttctggaagttccaaactcagaaccaaatgattaagcgcagtaatatactgatccctaatttcgaagctagcgatagcctgattgtctggaccatcgtttgtcataactccggatagagaaatatattgcggcatatacaaagttggaatttgactatcgactgcgaagacattagaccgtttaatagagtcatccccaccgatcaaagaattaatgatagtattattcattttctatttaaaatggaaaaagcttacaataaactccgtagagaaatatctataatttgtgagttttccttaaagtaacagcttccgtaaacgccgtctttatctcttagtaggtttattgtatttatgaccttttccttatcttcatagaatactaaaggcaacaaagaaatttttggttcttctctaagagctacgtgagacttaaccatagaagccaacgaatccctacatattttagaacagaaataccctacttcaccacccttgtatgtctcaatactaataggtctaaaaaccaaatcttgattacaaaaccaacacttatcaattacactatttgtcttaatagacacatctgccatagatttataatactttggtagtatacaagcgagtgcttcttctttagcgggcttaaagactgctttaggtgctgaaataaccacatctggaaggcttactcgcttagccatttaattacggaactatttttttatacttctaatgagcaagtagaaaacctctcatctacaaaaacgtactcgtgtccataatcctctaccatagttacacgttttttagatctcatatgtgctaaaaagttttcccatactaattggttactattatttttcgtataatttttaacagtttgaggttttagatttttagttacagaagtgatatcgaatattttatccaaaaagaatgaataattaattgtcttagaaggagtgttttcttggcaaaagaataccaagtgcttaaatatttctactacttcattaatcttttctgtactcagattcagtttctcatcttttacttgattgattatttcaaagactaacttataatcctttttatttattctctcgttagccttaagaaaactagatacaaaatttgcatctacatcatccgtggatatttgatttttttccatgatatccaagagttccgagataatttctccagaacattgatgagacaataatctccgcaatacatttctcaaatgaataagtttattagacacgtggaagtttgactttttttgtacctttgtacatttttgaaataccgactcgcaaaaaatacaatattcatatccttgttcagatactataccgttatgtctacaaccgctacataatcgtagattcatgttaacactctacgtatctcgtcgtccaatattttatataaaaacattttatttctagacgttgccagaaaatcctgtaatatttttagttttttgggctgtgaataaagtatcgccctaatattgttaccgtcttccgccaatatagtagttaaattatccgcacatgcagaagaacaccgcttaggcggattcagtacaatgttatatttttcgtaccaactcatttaaatatcataatctaaaatagttctgtaatatgtctagcgctaatatattgatcataatcctgtgcataaattaagatacaacaatgtctcgaaatcatcgacatggcttcttccatagttagaagatcgtcgtcaaagttagcaacgtgattcatcaacatttgctgttttgaggcagcaaatactgaaccgtcgccattcaaccattcataaaaaccatcgtctgaatccattgataatttcttgtactggtttttgagagctcgcatcaatctagcatttctagctcccggattgaaaacagaaagaggatcgtacatccagggtccattttctgtaaatagaatcgtataatgtcccttcaagaagatatcagacgatccacaatcaaagaattggtctccgagtttgtaacaaactgcggactttaacctatacatgataccgtttagcataatttctggtgatacgtcaatcggagtatcatctattagagatctaaagccggtgtaacattctccaccaaacatattcttattctgacgtcgttctacataaaacatcattgctccattaacgataacaggggaatgaacagcactacccatcacattagttcccaatggatcaatgtgtgtaactccagaacatcttccatagcctatgttaggaggagcgaacaccactcttccactattgccatcgaatgccatagaataaatatccttggaattgatagaaatcggactgtcggatgttgtgatcatcttcataggattaacaactatgtatggtgccgcctgaagtttcatatcgtaactgatgccgtttataggtctagccacagaaaccaacgtaggtctaaatccaactatagacaaaatagaagccaatatctgttcctcatctgtcataacttgagagcatccagtatgaataatcttcattagatggggatctaccgcatcatcatcgttacaataaaaaattcccattctaatgttcataattgcttttctaatcatggtatgcatgtttgctctctgaatctctgtggaaattagatctgatacacctgtaatcactatcggattatcctccgtaagacgattaaccaacaacatataattataagactttacttttctaaattcataaagttgctggattaggctataggtgtctccatgtacatacgcgttctcgagcgcaggaagtttaataccgaatagtgccatcagaataggatgaatatagtaattagtttctggttttctataaataaaagacaaatcttgtgaactagacatatcggtaaaatgcatggattggaatcgtgtagtcgacagaagaatatgatgattagatggagagtatattttatctaactctttgagttggtcaccgattctaggactagctcgagaatgaataagtactaaaggatgagtacatttcacagaaacactagcattgttcaatgtgctctttacatgggtaaggagttgaaatagctcgtttctatttgttctgacaatatttagtttattcataatgttaagcatatcctgaatagtaaagttagatgtgtcatacttgttagtagttagatatttagcaattgcattcccatcatttctcaatctcgtactccaatcatgcgtggatgctacttcgtcgatggaaaccatacaatcctttttgataggctgttgagattgatcatttcctgcacgtttaggtttggtacgttgatttctagcccctgcggatataaagtcatcgtctacaatttgggacaatgaattgcatacactacaagacaaagatttatcagaagtgtgaatatgatcttcatctaccaaagaaagagtttgattagtataactagattttagtcctgcgttagatgttaaaaaaacatcgctattgaccacggcttccattatttatattcgtagtttttactcgaaagcgtgattttaatatccaatcttattacttttggaatcgttcaaaacctttgactagttgtagaatttgatctattgccctacgcgtatactcccttgcatcatatacgttcgtcaccagatcgtttgtttcggcctgaagttggtgcatatctctttcaacattcgacatgagatccttaagggccatatcgtctagattttgttgagatgctgctcctggatttggattttgttgtgctgttgtacatactgtaccaccagtaggtgtaggagtacatacagtggccacaataggaggttgagaaagtgtaaccgttggagtagtacaagaaatacttccatccgattgttgtgtacatgtagttgttggtaacgtctgagaaggttgggtagatggcggcgtcgtcgttttttgatctttattaaatttagagataatatcctgaacagcattgctcggcgtcaacgctggaaggagtgaactcgccggcgcatcagtatcttcagacagccaatcaaaaagattagacatatcagatgatgtattagtttgttgtcgtggttttggtgtaggagcagtactactaggtagaagaataggagccgatgtagctgttggaaccggctgtggagttatatgaatagttggttgtagcggttggataggctgtctgctggcggccatcatattatctctagctagttgttctcgcaactgtctttgataatacgactcttgagactttagtcctatttcaatcgcttcatcctttttcgtatccggatccttttcttcagaataatagattgacgactttggtgtagaggattctgccagcctctgtgagaacttgttaaagaagtccatttaaggctttaaaattgaattgcgattataagattaaatggcagacacagacgatattatcgactatgaatccgatgatctcaccgaatacgaggatgatgaagaagaggaagaagatggagagtcactagaaactagtgatatagatcccaaatcttcttataagattgtagaatcagcatccactcatatagaagatgcgcattccaatcttaaacatatagggaatcatatatctgctcttaaacgacgctatactagacgtataagtctatttgaaatagcgggtataatagcagaaagctataacttgcttcaacgaggaagattacctctagtttcagaattttctgacgaaacgatgaagcaaaatatgctacatgtaattatacaagagatagaggagggttcttgtcctatagtcatcgaaaagaacggagaattgttgtcggtaaacgattttgacaaagatggtctaaaattccatctagactatattatcaaaatttggaaacttcaaaaacgatattagaatttatacgaatatcgttctctaaatgtcacaatcaagtctcgcatgttcagcaatttattgtcgtactttatatcgtgttcattaacgatatcttgcaaaatagtaatgattctatcttccttcgatagatattcttcagagattattgtcttatattctttcttgttatcagatatgaatttgataagactttgaacattattgatacccgtctgtttaattttttctacagatattttagttttggcagattctatcgtatctgtcaatagacatccaacatcgacattcgacgtcaattgtctataaatcaacgtataaattttagaaataacattagcgaattgttgtgcgttgatgtcgttattctgaaacagtatgattttaggtagcattttcttaacaaagagaacgtatttattgttactcagttgaacagatgatatatccagattactaacgcatctgattccgtataccaaactttcagaagaaatggtatacaattgtttgtattcattcaatgtctctttttcagaaattagtttagagtcgaatactgcaataattttcaagagatagttttcatcagataagattttatttagtgtagatatgataaaactattgttttgttggagaacttgatacgccgcgttctctgtagtcgacgctctcaaatgggaaacaatctccattatttttttggaatcggatactatatcttcggtatcttgacgcagtctagtatacatagagttaagagagattagagtttgtacattaagcaacatgtctctaaatgtggctacaaacttttcctttttcacatcatctagtttattatataccgatttcacaacggcaccagatttaaggaaccagaatgaaaaactctgataactacaatatttcatcatagttacgattttatcatcttctatagttggtgtaatagcgcatacctttttctccaagactggaaccaacgtcataaaaatgtttaaatcaaaatccatatcaacatctgatgcgctaagaccagtctcgcgttcaagattatctttactaatggtgacgaactcatcgtataaaactctaagtttgtccattatttatttacagatttagttgtttaatttatttgtgctcttccagagttgggatagtatttttctaacgtcggtattatattattaggatctacgttcatatgtatcataatattaatcatccacgttttgataaatctatctttagcttctgaaataacgtatttaaacaaaggagaaaaatatttagctacggcatcagacgcaataacattttttgtaaatgtaacgtatttagacgacagatcttcgttaaaaagttttccatctatgtagaatccatcggttgttaacaccattcccgcgtcagattgaataggagtttgaatagtttgttttggaaatagatccttcaataacttatagttgggtgggaaaaaatcgattttatcactagactctttcttttttactatcattacctcatgaactatttcttgaatgagtatatgtattttctttcctatatcggacgcgttcattggaaaatataccatgtcgttaactataagaatatttttatcctcgtttacaaactgaataatatcagatgtagttcgtaaacgaactatatcatcaccagcacaacatctaactatatgatatccactagtttcctttagccgtttattatcttgttccatattagcagtcattccatcatttaagaaggcgtcaaaaataatagggagaaatgacattttggattctgttacaactttaccaaaattaaggatatacggacttactatctttttctcaacgtcaatttgatgaacacacgatgaaaatgtgcttctatgagattgatcatgtagaaaacaacaagggatacaatatttccgcatatcatgaaatatattaagaaatcccaccttattatatttccccaaaggatccatgcacgtaaacattatgccgttatcattaataaagacttctttctcatcggatctgtaaaagttgttactgatttttttcattccaggatctagataattaataatgatgggttttctattcttattctttgtattttggcatatcctagaccagtaaacagtttccactttggtaaaatcagcagacttttgaacgctattaaacatggcattaatggcaataactaaaaatgtaaaatatttttctatgttaggaatatggtttttcactttaatagatatatggtttttggccaaaatgatagatatttttttatccgaggatagtaaaatattattagtcgccgtctctataaaaatgaagctagtctcgatatccaattttattctagaattgataggagtcgccaaatgtaccttatacgttatatctcccttgatgcgttccatttgtgtatctatatcggacacaagatctgtaaatagttttacgttattaatcatcacggtatcgccgtcgctagataacgctaatgtaccatccaagtcccaaatggagagatttaactgttcatcgtttagaataaaatgattaccggtcatattaataaagtgttcatcgtatctagataacaacgacttataattaatgtccaagtcttgaactcgctgaatgatcttttttaacccagttagttttagattggtacgaaatatattgttaaactttgattctacagtaatgtccaaatctagttgtggaaatacttccatcaacattgtttcaaacttgataatattattatctacatcttcgtacgatccaaattccggaatagatgtatcgcacgctctggccacccagataaccaaaaagtcacacgctccaggatatacattgtataaaaagctatcgttttttagtagggtttttttctgcgtgtatacgaagggattaaaaatagtattatcaacgtaactatattccaaattattcttatgagaatagataataatatcgtccttaatatctaacaaatttcctaaatatccctttaattgagtcattcgaagcgtcaatagaatatgtctcttaactatttccggctgttgtatatttaaatgacttcgtaaaaaataatatatgggcgacttctcatctatgtaatcatatggagtgagatatagggctcgttctacctcctgccccttacccacctgtaataccaattgcggacttactatatatcgcatatttatatcgtggggtaaagtgaaaatctactaccgatgatgtaagtcttacaatgttcgaaccagtaccagatcttaatttggaggcctccgtagaactaggggaggtaaatatagatcaaacaacacctatgataaaggagaatagcggttttatatcccgcagtagacgtctattcgcccatagatctaaggatgatgagagaaaactagcactacgattctttttacaaagactttattttttagatcatagagagattcattatttgttcagatgcgttgacgctgtaaaagacgtcactattaccaaaaaaaataacattatcgtggcgccttatatagcacttttaactatcgcatcaaaaggatgcaaacttacagaaacaatgattgaagcattctttccagaactatataatgaacatagtaagaaatttaaattcaactctcaagtatccatcatccaagaaaaactcggataccagtttggaaactatcacgtttatgattttgaaccgtattactctacagtagctctggctattcgagatgaacattcatctggcatttttaatatccgtcaagagagttatctggtaagttcattatctgaaataacatatagattttatctaattaatctaaaatctgatcttgttcaatggagtgctagtacgggcgctgtaattaatcaaatggtaaatactgtattgattacagtgtatgaaaagttacaactggtcatagaaaatgattcacaatttacatgttcattggctgtggaatcaaaacttccaataaaattacttaaagatagaaatgaattatttacaaaattcattaacgagttaaaaaagaccagttcattcaagataagcaaacgcgataaggatacgctactaaaatattttacttaggactggagttagaatttatagacgactcatttcgtttatcattgttactattattactattactatcattattagtgttggcattattagtattcttcttgtcatcttgttcagaaatatacagcaatgctatacctaatactaaatacattatcatgctcgcaatggctctaacaacaacgaaccaaaatgaatttggtcgtagcttttgttcacaaaaatacataaagaaatgtctacataaatctatggcgccattggctacttgaaatagcgccagtcctcctacagattttaatatagctgtataacatgacatttattcatcatcaaaagagacagagtcaccatctgtcatatttagattttttttcatgtgttcaaagtatcctctactcatttcattataatagtttatcatacttagaattttaggacggatcaatgagtaagacttgactagatcgtcagtagtaatttgtgcatcgtctattctgcatccgcttcgtcgaataatgtatagcatcgctttgagattctccatagctatcaagtctttatacaatgacatggaaatatctgtgaatactttatacttctccaacatcgatgccttaacatcatcgcctactttagcattgaaaatacgttctattgtgtagatggatgtagcaagatttttaaacaacaatgccatcttacacgatgattgcctcaagtctccaatcgtttgtttagaacgattagctacagagtccaatgcttggctgactagcatattattatctttagaaattgtattcttcaatgaggcgtttatcatatctgtgatttcgttagtcatattacagtctgactgggttgtaatgttatccaacatatcacctatggatacggtacacgtaccagcatttgtaataatcctatctaagatgttgtatggcattgcgcagaaaatatcttctcctgtaatatctccactctcgataaatctactcagattattcttaaatgccttattctctggagaaaagatatcagtgtccatcatttcattaatagtatacgcagaaaagataccacgagtatcaattctatccaagatacttatcggttccgagtcacagataatggtttcctctccttcgggagatcctgcatagaaatatctaggacaatagtttctatactgtctgtaactctgataatctctaaagtcactaactgataccatgaaattgagaagatcaaacgctgaagtaattaatttttctgcctcgtttttactacaactagttttcatcaatgtagtgacgatgtattgtttagttacttttggtctaatactgatgatagagatattattgcttcccataatggatcttctagtagtcaccttaaagcccattgatgcgaatagcagatagataaagtcttggtatgactcctttctaatatagtacggactacctttgtcacccaactttatacccacataagccataacaacctctttaatagccgtttcatgaggtttatcagccatgagcctgagtagttggaagaatctcatgaatcccgtctcagaaagtcctatatgcatgatagatttatctttcctgggaaactctcgtatagtcatagatgaaatactctttaaagtttctgaaataagattagtaacagtcttacctccgactactctaggtaacaaacaaactctaataggtgttttctctgcggagataatatcagaaaggatagagcaataagtagtattattgtgattataaagaccgaatacataacaggtagaatttataaacatcatgtcctgaaggtttttagacttgtattcctcgtaatccataccgtcccaaaacatggatttggtaactttgatagccgtagatctttgttccttcgccaacaggttaaagaaattaataaagaatttgttgtttctatttatgtccacaaattgcacgtttggaagcgccacggttacattcactgcagcattttgaggatcgcgagtatgaagtacgatgttattgtttactggtatatctggaaagaaatctaccagtctaggaataagagattgatatcgcatagaaatagtaaagtttataatctcatcatcgaagagcattttgttaccattgtaataaatatccactctgtcatatgtataaatgaagtactgttcaaacatgatgagatgtttatatgttggcatagtagtgagatcgacgtttggtaatggcaatgtattaagattaactccataatgtctagcagcatctgcgatgttataagcgtcgtcaaagcggggtcgatcttgtattgttatatattgtctaacacctataagattatcaaaatcttgtctgcttaatacaccgttaacaatttttgccttgaattcttttattggtgcattaataacatccttatagaggatgttaaacaaataagtgttatcaaagttaagatctggatatttcttttctgctagaacatccattgagtcggagccatctggtttaatataaccaccgataaatctagctctgtattctgtatccgtcaatctaatattaagaaggtgttgagtgaaaggtggaagatcgtaaaagctgtgagtattaatgataggattagtttccgaactaatgttaattggggtattaataatatctatatttccagcgttaagtgtaacattaaacagttttaattcacgtgacgtggtatcaattaaataattaatgcccaatttggatatagcagcctgaagctcatcttgtttagttacggatcctaatgagttattaagcaatatatcgaacggatgaacgaaggttgttttaagttggtcacatactttgtaatctagacatagatgcggaagaacggtagaaactatacgaaataaatattcagagtcctctaattgatcaagagtaactattgacttaataggcatcatttatttagtattaaatgacgaccgtaccagtgacggatatacaaaacgatttaattacagagttttcagaagataattatccatctaacaaaaattatgaaataactcttcgtcaaatgtctattctaactcacgttaacaacgtggtagatagagaacataatgccgccgtagtgtcatctccagaggaaatatcctcacaacttaatgaagatctatttccagatgatgattcaccggccactattatcgaacgagtacaacctcatactactattattgacgatactccacctcctacgtttcgtagagagttattaatatcggaacaacgtcaacaacgagaaaaaagatttaatattacagtatcgaaaaatgctgaagcaataatggaatctagatctatgataacttctatgccaacacaaacaccatccttgggagtagtttatgataaagataaaagaattcagatgttagaggatgaagtggttaatcttagaaatcaacgatctaatacaaaatcatctgataatttagataattttaccaaaatactatttggtaagactccgtacaaatcaacagaagttaataagcgtatagccatcgttaattatgcaaatttgaacgggtcccccttatcagtcgaggacttggatgtttgttcggaggatgaaatagatagaatctataaaacgattaaacaatatcacgaaagtagaaaacgaaaaattatcgtcactaacgtgattattattgtcataaacattatcgagcaggcattgctaaaactcggatttgaagaaatcaaaggactgagtaccgatatcacttcagaaattatcgatgtggagatcggagatgactgcgatgctgtagcatctaaactaggaatcggtaacagtccggttcttaatattgtattgtttatactcaagatattcgttaaacgaattaaaattatttaatttaatacattcccatatccagacaacaatcgtctggattaatctgttcctgtcgtctcataccggacgacatattaatctttttattagtgggcatctttttagatggtttctttttcccagcattaactgagtcgatacctagaagatcgtgattgatctctccgaccattccacgaacttctaattggccgtctctgacggtaccataaactattttaccagcattagtaacagcttggacaatctgaccatccatcgcattgtacgatgtagtagtaactgttgttctacgtctaggagcaccagaagtatttttggagcccttggatgttgatgtagaagaagacgaggattttgattttggtttacatgtaatacattttgaactctttgattttgtatcacatgcgccggcagtcacatctgtttgagaattaagattattgttgcctcctttgacggctgcatctccaccgatttgcgctagtagatttttaagctgtggtgtaatcttattaactgtttcgatataatcatcgtaactgcttctaacggctaaattttttttatccgccatttagaagctaaaaatatttttatttatgcagaagatttaactagattatacaatgaactaatatgatccttttccagattatttacaaacttggtattttttggttctggaggaggcgaatttaaattcggacttggattcggattttgtaagttcttgatcttattatacatcgagtataggatggcgacagtaactgctacacaaataccgatcaaaagaagaataccaatcatttattgacaataacttcactattgatcaagtatgcaatatatcatcttttcactaaataagtagtaataatgattcaacaatgtcgagatatatggacgataataatttagttcatggaaatatcgctatgattggtgtgaatgactccgctaactctgtggggtgcgcagtgctttccccacatagaataaattagcattccgactgtgataataataccaagtataaacgccataatactcaatactttccatgtacgagtgggactggtagacttactaaagtcaataaaggcgaagatacacgaaagaatcaaaagaatgattccagcgattagcacgccggaaaaataatttccaatcataagcatcatgtccatttaactaataaaaattttaaatcgccgaatgaacaaagtggaatataaaccatataaaaacaatagtttgtactgcaaaaataatatctatttttgttttcgaagatatggtaaaattaaatagtagtacacagcatgttataactaacagcagcaacggctcgtaattacttatcatttactagacgaaaaggtggtgggatattttcttgctcaaataatacgaatatatcacccatccattttatgcgatgtttatatactctaatctttaatagatctatagacgacgggtttaccaacaatatagattttatcgattcatctaatttaaacccttccttaaacgtgaatgatctattatctggcataacgatgaccctacctgatgaatcggacaatgtactgggccatgtagaataaattatcaacgaattatcgtctacgaacatttatatcatttgttttaattttaggacgcgaataaatggatataaaatagaaaataacagatattacaaccagtgttatggccgcgcccaaccaggtaggcagttttattttatcttttactacaggttctcctggatgtacgtcaccaacggcggacgtagttctagtacaattagacgtaagttccgcttgggaattttttaacgctaaagagttaacgttaatcgtgcacccaacgtatttacatctagttcgttgaacatcttgattataatataaccattttctatctctagattcgtcagtgcactcatgtaaccaacataccctaggtcctaaatatttatctccggaattagattttggataattcgcgcaccaacaatttctatttcctttatgatcgttacaaaagacgtataatgccgtatccccaaaagtaaaataatcaggacgaataattctaataaactcagaacaatatctcgcatccatatgtttggagcaaatatcggaataagtagacatagccggtttccgttttgcacgtaaccattctaaacaattggggtttccaggatcgtttctacaaaatccagtcatgaaatcgtcacaatgttctgtcttgtaattattattaaatatttttggacagtgtttggtatttgtcttagaacaacattttgccacgctatcactatcgcccaggagataatccttttttataaaatgacatcgttgcccggatgctatataatcagtagcgtgttttaaatccttaatatattcaggagttacctcgttctgataatagattaatgatccaggacgaaatttgaaagaactacatggttctccatgaattaatacatattgtttagcaaattcaggaactataaaactactacaatgatctatcgacataccatctatcaaacaaaacttgggtttaatttctcccggagatgtttcataatagtacgtataactttcttctgcaaacttaacagctctattatattcaggataattaaaacctaattccatatatttgtctcgtatatctgctattcctggtgctattttgattctattaagagtaacagctgcccccattcttaataatcgtcagtatttaaactgttaaatgttggtatatcaacatctaccttatttcccgcagtataaggtttgttgcaggtatactgttcaggaatggttacatttatacttcttctatagtcctgtctttcgatgttcatcacatatgcaaagaacagaataaacaaaataatgtaagaaataatattaaatatctgtgaattcgtaaatacattgattgccataataattacagcagctacaatacacacaatagacattcccacagtgttgccattacctccacgatacatttgagttactaagcaataggtaataactaagctagtaagaggcaatagaaaagatgagataaatatcatcaatatagagattagaggagggctatatagagccaagacgaacaaaatcaaaccgagtaacgttctaacatcattatttttgaagattcccaaataatcattcattcctccataatcgttttgcatcatacctccatctttaggcataaacgattgctgctgttcctctgtaaataaatctttatcaagcactccagcacccgcagagaagtcgtcaagcatattgtaatatcttaaataactcatttatatattaaaaaatgtcactattaaagatggagtataatctttatgccgaactaaaaaaaatgacttgtggtcaacccctaagtctttttaacgaagacggggatttcgtagaagttgaaccgggatcatcctttaagtttctgatacctaagggattttacgcctctccttccgtaaagacgagtctagtattcgagacattaacaacgaccgataataaaatcactagtatcaatccaacaaatgcgccaaagttatatcctcttcaacgcaaagtcgtatctgaagtagtttctaatatgaggaaaatgatcgaatcaaaacgtcctctatacatcactcttcacttggcgtgtggatttggtaagactattaccacgtgttatcttatggctacacacggtagaaaaaccgtcatttgcgtacccaataaaatgttaatacatcaatggaagacacaggtagaggcagtcggattggaacataagatatccatagatggagtaagtagtctattaaaggaactaaagactcaaagtccggatgtattaatagtagtcagtagacatctgacaaacgatgccttttgtaaatatatcaataagcattatgatttgttcatcttggatgaatcacatacgtataatctgatgaacaatacagcagttacaagatttttagcgtattatcctccgatgatgtgttattttttaactgctacacctagaccatctaaccgaatttattgtaacagtattattaatattgccaagttatccaatctaaaaaaaactatctatgcagtagatagtttttttgagccatattccacagataatattagacatatggtaaaacgactagatggaccatctaataaatatcatatatataccgagaagttattatctgtagacgagcctagaaatcaacttattcttgataccctggtagaagaattcaagtcaggaactattaatcgcattttagttattactaaactacgtgaacatatggtattattctacaaacgattattagattttttcggaccagaggttgtatttataggagacgcccaaaatagacgtactccagatatggtcaaatcaatcaaggaactaaatagatttatattcgtatccaccttattttattccggtactggtttagatattcctagtttggattcgttgttcatttgctcggcagtaatcaacaatatgcaaatagagcaattactagggagggtatgtcgagaaacagaactattagataggacggtatatgtatttcctaacacatccatcaaagaaataaagtacatgataggaaatttcatgcaacgaattattagtctgtctgtagataaactaggatttaaacaaaaaagttatcggaaacatcaagaatccgatcccacttctgcatgtacaacatcatccagagaagaacgtgtattaaatagaatatttaactcgcaaaatcgttaagaagtttaagcgacgatccgcatgctgcgcaggccagtgtattacccctcatagtattaatataatccaatgatacttttgtgatgtcggaaatcttaaccaatttagactgacaggcagaacacgtcatgcaatcatcatcgtcatcgataactgtagtcttgggcttctttttgcgactcttcattccggaacgcacattggtgctatccatttaggtagtaaaaaataagtcagaatatgccctataacacgatcgtgcaaaacctggtatatcgtctctatctttatcacaatatagtgtatcgacatttttattattattgacctcgtttatcttggaacatggaatgggaacatttttgttatcaacggccatctttgccttaattccagatgttgtaaaattataactaaacagtctatcatcgacacaaatgaaattcttgtttagacgtttgtagtttacgtatgcggctcgttcgcgtctcattttttcagatattgcaggtactataatattaaaaataagaatgaaataacataggattaaaaataaagttatcatgacttctagcgctgatttaactaacttaaaagaattacttagtctgtacaaaagtttgagattttcagattctgcggctatagaaaagtataattctttggtagaatggggaacatctacttactggaaaataggcgtgcaaaaggtagctaatgtcgagacgtcaatatctgattattatgatgaggtaaaaaataaaccgtttaatattgatccgggctattacattttcttaccggtatattttgggagcgtctttatttattcgaagggtaaaaatatggtagaacttggatctggaaactcttttcaaataccagatgatatgcgaagtgcgtgtaacaaagtattagacagcgataacggaatagactttctgagatttgttttgttaaacaatagatggataatggaagatgctatatcaaaatatcagtctccagttaatatatttaaactagctagtgagtacggattaaacatacccaaatatttagaaattgaaatagaggaagacacattatttgacgacgagttatactctattatagaacgctctttcgatgataaatttccaaaaatatccatatcgtatattaagttgggagaacttagacggcaagttgtagactttttcaaattctcattcatgtatattgagtccatcaaggtagatcgtataggagataatatttttattcctagcgttataacaaaatcaggaaaaaagatattagtaaaagatgtagaccatttaatacgatccaaggttagagaacatacatttgtaaaagtaaaaaagaaaaacacattttccattttatacgactatgatggaaacggaacagaaactagaggagaagtaataaaacgaattatagacactataggacgagactattatgttaacggaaagtatttctctaaggttggtagtgcaggcttaaagcaattgactaataaattagatattaatgagtgcgcaactgtcgatgagttagttgatgagattaataaatccggaactgtaaaacgaaaaataaaaaaccaatcagcatttgatttaagcagagaatgtttgggatatccagaagcggattttataacgttagttaataacatgcggttcaaaatagaaaattgtaaggttgtaaatttcaatattgaaaatactaattgtttaaataacccgagtattgaaactatatatggaaactttaaccagttcgtctcaatctttaatgtcgtcaccgatgtcaaaaaaagattattcgagtgaaataatatgcgcctttgatataggtgcaaaaaatcctgccagaactgttttagaagtcaaggataactccgttagggtattggatatatcaaaattagactggagttctgattgggaaaggcgcatagctaaagatttgtcacaatatgaatacactacagttcttctagaacgtcagcctagaaggtcgccgtatgttaaatttatctattttattaaaggctttttatatcatacatcggctgccaaagttatttgcgtctcgcctgtcatgtctggtaattcatatagagatcgaaaaaagagatcggtcgaagcatttcttgattggatggacacattcggattgcgagactccgttccggatagacgcaaattagacgatgtagcggatagtttcaatttggctatgagatacgtattagataaatggaatactaattatacaccttataataggtgtaaatctagaaattacataaaaaaaatgtaataacgttagtaacgccattatggataatctatttacctttctacatgaaatagaagatagatatgccagaactatttttaactttcatctaataagttgcgatgaaataggagatatatatggtcttatgaaagaacgcatttcctcagaggatatgtttgataatatagtgtataataaagatatacatcctgccattaagaaactagtgtattgcgacatccaacttactaaacacattattaatcagaatacgtatccggtatttaacgattcttcacaagtgaaatgttgtcattatttcgacataaactcagataatagcaatattagctctcgtacagtagagatatttgagagggaaaagtcatctcttgtatcatatattaaaactaccaataagaagagaaaggtcaattacggcgaaataaagaaaactgttcatggaggcactaatgcaaattacttttccggtaaaaagtctgacgagtatctgagtactacagttagatccaacattaatcaaccttggatcaaaaccatctctaagaggatgagagttgatatcattaatcactctatagtaacgcgtggaaaaagctctatattacaaactatagaaattatttttactaatagaacatgtgtgaaaatattcaaggattctactatgcacattattctatccaaggacaaggatgaaaaggggtgtatacacatgattgacaaattattctatgtctattataatttatttctgttgttcgaagatatcatccaaaacgagtactttaaagaagtagctaatgttgtaaaccacgtactcacggctacggcattagatgagaaattattcctaattaagaaaatggctgaacacgatgtttatggagttagcaatttcaaaatagggatgtttaacctgacatttattaagtcgttggatcataccgttttcccctctctgttagatgaggatagcaaaataaagttttttaaggggaaaaagctcaatattgtagcattacgatctctggaggattgtataaattacgtgactaaatccgagaatatgatagaaatgatgaaggaaagatcgactattttaaatagcatagatatagaaacggaatcggtagatcgtctaaaagaattgcttctaaaatgaaaaaaaacactaattcagaaatggatcaacgactagggtataagtttttggtgcctgatcctaaagccggagttttttatagaccgttacatttccaatatgtatcgtattctaattttatattgcatcgattgcatgaaatcttgaccgtcaagcggccactcttatcgtttaagaataatacagaacgaattatgatagaaattagcaatgttaaagtgactcctccagattactcacctataatcgcgagtattaaaggtaagagttatgacgcattagccacgttcactgtaaatatctttaaagaggtaatgaccaaagagggtatatccatcactaaaataagtagttatgagggaaaagattctcatttgataaaaattccgctactaataggatacgggaataaaaatccacttgatacagccaagtatcttgttcctaatgtcataggtggagtctttatcaataaacaatctgtcgaaaaagtaggaattaatctagtagaaaagattacaacatggccaaaatttagggttgttaagccaaactcattcactttctcgttttcctccgtatcccctcctaatgtattaccgacaagatatcgccattacaagatatctctggatatatcacaattggaagcgttgaatatatcatcgacaaagacatttataacggtcaatattgttttgctgtctcaatatttatctagagtgagtctagaattcattagacgtagtttatcatacgatatgcctccagaagttgtctatctagtaaacgcgataatagatagtgctaaacgaattactgaatctattactgactttaatattgatacatacattaatgacctggtggaagctgaacacattaaacaaaaatctcagttaacgatcaacgagttcaaatatgaaatgctgcataactttttacctcatatgaactatacacccgatcaactaaagggattttatatgatatctttactaagaaagtttctctactgtatcttccacacttctagatatccagatagagattcgatggtttgtcatcgcatcctaacgtacggcaaatattttgagacgttggcacatgatgaattagagaattacataggcaacatccgaaacgatatcatgaacaatcacaagaacagaggcacttacgcggtaaacattcatgtactaacaactcccggacttaatcacgcgttttctagcttattgagtggaaagttcaaaaagtcagacggtagttatcgaacacatcctcactattcatggatgcagaatatttctattcctaggagtgttggattttatccggatcaagtaaagatttcaaagatgttttctgtcagaaaataccatccaagtcaatatctttacttttgttcatcagacgttccggaaagaggtcctcaggtaggtttagtatctcaattgtctgtcttgagttccattacaaatatactaacgtctgagtatttggatttggaaaagaaaatttgtgagtatatcagatcatattataaagatgatataagttactttgaaacaggatttccaatcactatagaaaatgctctagtcgcatctcttaatccaaatatgatatgtgattttgtaactgactttagacgtagaaaacggatgggattcttcggtaacttggaggtaggtattactttagttagggatcacatgaatgaaattcgcattaatattggagcgggaagattagtcagaccattcttggttgtggataacggagagctcatgatggatgtgtgtccggagttagaaagcagattagacgacatgacattctctgacattcagaaagagtttccgcatgtcatcgaaatggtagatatagaacaatttacttttagtaacgtatgtgaatcggttcaaaaatttagaatgatgtcaaaggatgaaagaaagcaatacgatttatgtgactttcctgccgaatttagagatggatatgtagcatcttcattagtgggaatcaatcacaattctggacccagagctattcttggatgtgctcaagctaaacaagctatctcttgtctgagctcggatatacgaaataaaatagacaatggaattcatttgatgtatccagagaggccaatcgtgattagtaaggctttagaaacttcaaagattgcggctaattgcttcggccaacatgttactatagcattaatgtcgtacaaaggtatcaatcaagaggatggaattatcatcaaaaaacaatttattcagagaggcggtctcgatattgttacagccaagaaacatcaagtagaaattccattggaaaactttaataacaaagaaagagataggtctaacgcctattcaaaattagaaagtaatggattagttagactgaatgctttcttggaatccggagacgctatggcacgaaatatctcatcaagaactcttgaagatgattttgctagagataatcagattagcttcgatgtttccgagaaatataccgatatgtacaaatctcgcgttgaacgagtacaagtagaacttactgacaaagttaaggtacgagtattaaccatgaaagaaagaagacccattctaggagacaaatttaccactagaacgagtcaaaagggaacagtcgcgtatgtcgcggatgaaacggaacttccatacgacgaaaatggtatcacaccagatgtcattattaattctacatccatcttctctagaaaaactatatctatgttgatagaagttattttaacagccgcatattctgctaagccgtacaacaataagggagaaaaccgacctgtctgttttcctagtagtaacgaaacatccatcgatacatatatgcaattcgctaaacaatgttatgagcattcaaatccgaaattgtccgatgaagaattatcggataaaatcttttgtgaaaagattctctatgatcctgaaacggataagccttatgcatccaaagtattttttggaccaatttattacttgcgtctgaggcatttaactcaggacaaggcaaccgttagatgtagaggtaaaaagacgaagctcattagacaggcgaatgagggacgaaaacgtggaggaggtatcaagttcggagaaatggagagagactgtttaatagcgcatggtgcagccaatactattacagaagttttgaaagattcggaagaagattatcaagatgtgtatgtttgtgaaaattgtggagacatagcagcacaaatcaagggtattaatacatgtcttagatgttcaaaacttaatctctctcctctcttaacaaaaattgataccacgcacgtatctaaagtatttcttactcaaatgaacgccagaggcgtaaaagtcaaattagatttcgaacgaaggcctccttcgttttataaaccattagataaagttgatctcaagccgtcttttctggtgtaatattctagtttggtagtagatacatatcaatatcatcaaattcgagatccgaattataaaatgggcgtggattgttaactatagaatcggacgtctgatattcgaaaatctgtggagtttcaggttttggtggaggtgtaactgctacttgggatactgaagtctgatattcagaaagctgtggatgttctggttcggcatccaccgatggtgtcacatcactaatcggttcggtaacgtctgtggatggaggtgctacttctacagaacctgtagcctcagttgtcaacggagatacatttttaatgcgagaaaatgtataatttggtaatggtttcttatgtggatctgaagaagaggtaagatatctactagaaagataccgatcacgttctagttctcttttgtagaacttaactttttctttctccgcatctagttgatattccaacctcttcacgttactacgttcagattccaattcacgttcgcatgggttacctccgcagtttttacgagcgatttcacgttcagccttcatgcgtctctccctctctctatcgagtttatcagagcagtctttctgaaggcgatcgaactccataaatttctccaacgctttgattgtttccatagatttccgaagttcagcttttaggactgtgattctttttctttcgaattcacagctggatgtacaaccgtttccattaccgccatctctaagtttcttttctagatcggcaacatttcatccccatgccttttacattcctcgagtctactgtcgtcgaaatatcgttccagctccttttcgacatcaataactttagcacgttgtctctcaagctctcttttgtagttatctgattccctggcacgtttaagatcttcatgcaattgagtcagctcttaacttcctctcttgcttcttcgtcatagtacgcgcaatcactgtgagatccattgttaccacgtctacactcggcgagctcgcgtttaagagattcaatttcccgtttgtattggtccatgtttccattgctaccaccattagatttacaggctgctagttgtcgttcgagatcagaaatacgggttttcttggaattgatttcgtcgatgtacttggcatcgaaacacttattaagttctttttccaattctacgattttatttctttcgcgagtcaattccctcctgtagtaactatctgttttgtcagattcacgctctctacgtagactttcttgcaagttactaatttgttccctagcacgtccgagtttagttttatatgctgaatagagttctgattcatcctttgagcagatctctagcgatcgtttaagattcctaattctagtctttagcctatttacctcctcagaagatgttccgttaccgttgcgtttacactcgttaagctgtctatcaagatccatgattctatctctaagacgttgcatctctctttccatatcagcattgctttcattattacgtctgcagtcactcaactgtctttcaatatctgagattctatctctaagacgtcgcatctctctctgtttcggcattggtttcattattacgtttacagtcgttcaactgtctttcaagatctgatattctagattggagtctgctaatctctgtagcattttcacggcattcactcagttgtctttcaagatctgaaattttagattggagtctgctaatctctgtaagatttcctcctccgctctcgatgcagtcggtcaacttattctctagttctctaatacgcgaacgcagtgcatcaacttcttgcgtgtcttcctggttgcgtgtacattcatcgagatctctaacgcgtcgtcgttcttcctcaagttctctgcgtactacagaaagcgtgtccctatcttgttgatatttagcaatttctgattctagagtactgattttgcttacgtagttactaatagttgtcttggccttatcaagatcctccttgtatttgtcgcattccttgatatccctacgaagtctggacagttcccattcgacattacgacgtttatcgatttcagctcggagatcgtcatcgcgttgttttagccacatacgactgagttcaagttctcgttgacaagatccatctacttttccattcctaatagtatccagttccttttctagttctgaacgcatttctcgttccctatcaagcgattctctcaattctcggatagtcttcttatcaatttctaataaatctgaaccatcatctgtcccattttgaatatccctgtgttctttgatctcttttgtaagtcggtcgattctttcggttttataaacagaatccctttccaaagtcctaatcttactgagtttatcactaagttctgcattcaattcggtgagttttctcttggcttcttccaactctgttttaaactctccactatttccgcattcttcctcgcatttatctaaccattcaattagtttattaataactagttggtaatcagcgattcctatagccgttcttgtaattgtgggaacataattaggatcttctaatggattgtatggcttgatagcatcatctttatcattattagggggatggacaaccttaattggttggtcctcatctcctccagtagcgtgtggttcttcaataccagtgttagtaataggcttaggcaaatgcttgtcgtacgcgggcacttcctcatccatcaagtatttataatcgggttctacttcagaatattcttttctaagagacgcgacttcgggagttagtagaagaactctgtttctgtatctatcaacgctggaatcaatactcaagttaaggatagcgaatacctcatcgtcatcatccgtatcttctgaaacaccatcatatgacatttcatgaagtctaacgtattgataaatagaatcagatttagtattaaacagatccttaacctttttagtaaacgcatatgtatattttagatctccagatttcataatatgatcacatgccttaaatgtcagtgcttccatgatataatctggaacactaatgggtgacgaaaaagatacagcaccatatgctacgttgataaataaatctgaaccactaagtagataatgattaatgttaagaaagaggaaatattcagtgtataggtatgtcttggcgtcatatcttgtactaaacacgctaaacagtttgttaatgtgatcaatttccaatagattaattagagcagcgggaataccaacaaacatattaccacatccgtattttctatgaatatcacatatcatgttaaaaaatcttgatagaagagcgaatatctcgtctgacttaatgagtcgtagttcagcagcaacataagtcataactgtaaatagaacatactttcctgtagtgttgattctagactccacatcaacaccattattaaaaatagttttatatacatctttaatctgctctccgttaatcgtcgaacgttctagtatacggaaacactttgatttcttatctgtagttaatgacttagtgatatcacgaagaatattacgaattacatttcttgtttttcttgagagacctgattcagaactcaactcatcgttccatagtttttctacctcagtggcgaaatctttggagtgcttggtacatttttcaataaggttcgtgacctccatttattataaaaaatttattcaaaacttaactacaatcgggtaattataagatcgtagatctcccatgtggcggaatactaccatctatcgcatgtggatggacagtaggtaatggccatgggaacagtaatgtttgcatatttatctttcttgctagtattactgcatattgtcccaatgtttcgatgtgatgttctaacctatcaactgccgctgtatcacaacaatagtgtccgatgaaattaagattatgatccaatgtgtttaatatatgattatcaagtcttatacgatccgcgtcttttttgacaggatcaggttcttctacaggaagaagtttcggcctcttatgatattcatgtctgggaaacggtggtctagggtgaggctccggtatcggagtgggttttggattataatcatcatcgtctatgacatcatcttcgacttcgatatttattttgctatcttgatgatgtcctgtatcagttgcattttcagcactcgactgaatattagcgcattcattgtctattattaccatatttctaaacccaaaatgtatgtgttgaacatcagtactatcgttgatgagtcttatagcatgaattcgcttatcgttatcgggtttatcttctgtcaccttagcaattccttttttattaaactctacataatcatatccatttctattgtttgttctaatataaacgagtatagcatcattgctaaatttttcaatagtatcaaaaacagaatatcctaaaccatataatatatattcaggaacactcaaactaaatgtccaggattctcctaaatacgtaaactttaatagtgcgaaatcattcaaaaatctaccacttatagatagatagtacataaatgcgtatagtagtctacctatctctttattatgaaaaccggcattacgatcatatatgtcgtgatatacctgtgatccgtttacgttaaaccataaatacatgggtgatcctataaacatgaatttatttctaattctcagagctatagttaattgaccgtgtaatatttgcttacatgcatacttgatacgcttattaataagatttttatcattgctcgttatttcagaatcgtatatataaggagtaccatcgtgattcttaccagatattatacaaaatactatatataaaatatattgacccacgttagtaatcatataaatgtttaacgttttaaattttgtattcaatgatccattatcatacgctatcatggtcttgtaatattcattctttaaaatataatattgtgttagccattgcattggagctcctaatggagattttctattctcatccattttaggataggctttcataaagtccctaataacttcgtgaataatgtttctatgttttctactgatgcatgtatttgcttcgatttttttatcccatgtttcatctatcatagatttaaacgcagtaatgctcgcaacattaacatcttgaaccgttggtacaattccgttccataaatttataatgttcgccatttatataactcattttttgaatatacttttaattaacaaaagagttaagttactcatatggacgccgtccagtctgaacatcaatctttttagccagagatatcatagccgctcttagagtttcagcgtgattttccaacctaaatagaacttcatcgttgcgtttacaacacttttctatttgttcaaactttgttgttacattagtaatctttttttccaaattagttagccgttgtttgagagtttcctcattgtcgtcttcatcggctttaacaattgcttcgcgtttagcctctggctttttagcagcctttgtagaaaaaaattcagttgctggaattgcaagatcgtcatctccggggaaaagagttccgtccatttaaagtacagattttagaaactgacactctgcgttatttatatttggtacaacacatggattataaatattgatgttaataacatcagaaaatgtaaagtctatacattgttgcatcgtgttaaattttctaatggatctagtattattgggtccaacttctgcctgaaatccaaatatggaagcggatacaaaaccgtttcctggataaaccacacatctccacttttgctttacatcagaaattgtgtcgttgacatcttgaactctcctatctaatgccggtgttccacctatagattttgaatattcgaatgctgcatgagtagcattaaattccttaatattgccataattttcatatattgagtaaccctggataaaaagtaaacacaccgcagccgtcgctaccacaataaaaaaaattgatagagagttcatttataatctattagaagctgacaaaatttttttacacgcatcagacaatgctttaataaatagttcaacatctacttttgtcatatcgaaccgatggtatgattctaacctagaattacatccgaaaaagttgactatgttcatagtcattaagtcattaacaaacaacattccagactctggattataagacgatactgtttcgtcacaattacctaccttaatcatgtgattatgaatattggctattagagcaccttctaagaaatctataatatctttgaaacacgatttaaaatcaaaccacgaatatacttctacgaagaaagttagtttacccataggagaaataactataaatggagatctaaatacaaaatccggatctatgatagttttaacattattatattctctattaaatacctccacatctaaaaatgttaattttgaaactatgtcttcgtttattaccgtacctgaactaaacgctataagctctattgtttgagaactctttaaacgatattcttgaaatacatgtaacaaagtttcctttaactcggtcggtttatctaccatagttacagaatttgtatccttatctataatataataatcaaaatcgtataaagttatataattatcgcgttcagattgtgatcttttcaaatagactaaaaaccccatttctctagtaagtatcttatgtatatgtttgtaaaatatcttcatggtgggaatatgctctaccgcagttagccattcctcattgacagcggtagatgtattagacaaaactattccaatgtttaacaagggccattttacgagattattaaatccttgtttgataaatgtagccaatgagggttcgagttcaacgacgattgaattctcttcccgcggatgctgcatgatgaacgacgggatgttgttcgattgatttggaattctttttcgactttttgtttatattaaatattttaaaatttatagcggatagcaattcatgtaccacggataatgtagacgcgtattgcgcatcgatatctttattattagataaatttatcaataaatgtgagaagtttgcctcgttaaggtcttccatttaaatattatataaacatttgtgtttgtatcttattcgtcttttatggaatagttttttactagtaaagctgcaattacacactttgtccgtaaaacataaatataaacaccagcttttatcaatcgttccaaaaagtcgacggcggacatttttaacatggcatctattttaaatacacttaggtttttggaaaaaacatcattttataattgtaacgattcaataactaaagaaaagattaagattaaacataagggaatgtcatttgtattttataagccaaagcattctaccgttgttaaatacttgtctggaggaggtatatatcatgatgatttggttgtattggggaaggtaacaattaataatctaaagatgatgctattttacatggatttatcatatcatggagtgacaagtagtggagcaatttacaaattgggatcgtctatcgatagactttctctaaataggactattgttacaaaagttaataattatgatgatacattttttgacgacgatgattgatcgctattgcacaattttgtttttgtactttctaatatagtgtttaggttctttttcatatgagaatattgatttactaaaatatctatgtttaacttttgttctatgacgtccttatcggcggtatcggtacatatacgtaattcaccttcacaaaatacggagtcttcgataataatagccaatcgattattggatctagctgtctgtatcatattcaacatgtttaatatatcctttcgtttcccctttacaggcatcgatcgtagcatattttccgcgtctgatatggaaatgttaaaactacaaaaatgcgtaatgttagcccgtcctaatattggtacgtgtctataagtttggcatagtagaataatagacgtgtttaaatgccttccaaagtttaagaattctattagagtattgcattttgatagtttatcgcctacatcatcaaaaataagtaaaaagtgtgctgattttttatgattttgtgcgacagcaatacatttttctatgttacttttagttcgtatcagattatattctagagattcctgactactaacgaaattaatatgatttggccaaatgtatccatcataatctgggttataaacgggtgtaaacaagaatatatgtttatattttttaactagtgtagaaaacagagatagtaaatagatagtttttccagatccagatcctcctgttaaaaccattctaaacggcatttttaataaattttctcttgaaaattgtttttcttggaaacaattcataattatatttacagttactaaattaatttgataataaatcaaaatatggaaaactaaggttgttagtagggaggagaacaaagaaggcacatcgtgatataaataacatttattatcatgatgacaccagaaaacgacgaagagcagacatctgtgttctccgctactgtttacggagacaaaattcagggaaagaataaacgcaaacgcgtgattggtctatgtattagaatatctatggttatttcactactatctatgattaccatgtccgcgtttctcatagtgcgcctaaatcaatgcatgtctgctaacgaggctgctattactgacgccgctgttgccgttgctgctgcatcatctactcatagaaaggttgcgtctagcactacacaatatgatcacaaagaaagctgtaatggtttatattaccagggttcttgttatatattacattcagactaccagttattctcggatgctaaagcaaattgcactgcggaatcatcaacactacccaataaatccgatgtcttgactacctggctcattgattatgttgaggatacatggggatctgatggtaatccaattacaaaaactacatccgattatcaagattctgatgtatcacaagaagttagaaagtatttttgtgttaaaacaatgaactaatatttatttttgtacattaataaatgaaatcgcttaatagacaaactgtaagtaggtttaagaagttgtcggtgccggccgctataatgatgatactctcaaccattattagtggcataggaacatttctgcattacaaagaagaactgatgcctagtgcttgcgccaatggatggatacaatacgataaacattgttatttagatactaacattaaaatgtctacagataatgcggtttatcagtgtcgtaaattacgagctagattgcctagacctgatactagacatctgagagtattgtttagtattttttataaagattattgggtaagtttaaaaaagaccaatgataaatggttagatattaataatgataaagatatagatattagtaaattaacaaattttaaacaactaaacagtacgacggatgctgaagcgtgttatatatacaagtctggaaaactggttaaaacagtatgtaaaagtactcaatctgtactatgtgttaaaaaattctacaagtgacaacaaaaaatgaattaataataagtcgttaacgtacgccgccatggacgccgcgtttgttattactccaatgggtgtgttgactataacagatacattgtatgatgatctcgatatctcaatcatggactttataggaccatacattataggtaacataaaaactgtccaaatagatgtacgggatataaaatattccgacatgcaaaaatgctactttagctataagggtaaaatagttcctcaggattctaatgatttggctagattcaacatttatagcatttgtgccgcatacagatcaaaaaataccatcatcatagcatgcgactatgatatcatgttagatatagaagataaacatcagccattttatctattcccatctattgatgtttttaacgctacaatcatagaagcgtataacctgtatacagctggagattatcatctaatcatcaatccttcagataatctgaaaatgaaattgtcgtttaattcttcattctgcatatcagacggcaatggatggatcataattgatgggaaatgcaatagtaattttttatcataaaagttgtaaagtaaataataaaacaataaatattgaactagtagtacgtatattgagcaatcagaaatgatgctggtacctcttatcacggtgaccgtagttgcgggaacaatattagtatgttatatattatatatttgtaggaaaaagatacgtactgtctataatgacaataaaattatcatgacaaaattaaaaaagataaagagttctaattccagcaaatctagtaaatcaactgatagcgaatcagactgggaggatcactgtagtgctatggaacaaaacaatgacgtagataatatttctaggaatgagatattggacgatgatagcttcgctggtagtttaatatgggataacgaatccaatgttatggcgcctagcacagaacacatttacgatagtgttgctggaagcacgctgctaataaataatgatcgtaatgaacagactatttatcagaacactacagtagtaattaatgaaacggagactgttgaagtacttaatgaagataccaaacagaatcctaactattcatccaatcctttcgtaaattataataaaaccagtatttgtagcaagtcaaatccgtttattacagaacttaacaataaatttagtgagaataatccgtttagacgagcacatagcgatgattatcttaataagcaagaacaagatcatgaacacgatgatatagaatcatcggtcgtatcattggtgtgattagtttcctttttataaaattgaagtaatatttagtattattgctgccgtcacgttgtacaaatggagatattccctgtattcggcatttctaaaattagcaattttattgctaataatgactgtagatattatatagatacagaacatcaaaaaattatatctgatgagatcaatagacagatggatgaaacggtacttcttaccaacatcttaagcgtagaagttgtaaatgacaatgagatgtaccatcttattcctcatagattatcgacgattatactctgtattagttctgtcggaggatgtgttatctctatagataatgacatcaatggcaaaaatattctaacctttcccattgatcatgctgtaatcatatccccactgagtaaatgtgtcgtagttagcaagggtcctacaaccatattggttgttaaagcggatatacctagcaaacgattggtaacatcgtttacaaacgacatactatatgtaaacaatctgtcactgattaattatttgccgttgtctgtattcattattagacgagtcaccgactatttggatagacacatatgcgatcagatatttgctaataataagtggtattcccttataaccatcgacgataagcaatatcctattccatcaaactgtataggtatgtcctctgccaagtacataaattctagcatcgagcaagatactttaatccatgtttgtaacctcgagcatccgttcgactcagtatacaaaaaaatgcagtcgtacaattctctacctatcaaggaacaaatattgtacggtagaattgataatataaatatgagcattagtatttctgtggattaatagatttctagtatggggatcattaatcatctctaatctctaaatacctcataaaacgaaaaaaaagctattatcaaatactgtacggaatggattcattctcttctctttttatgaaactctgttgtatatctactgataaaactggaagcaaaaaatctgatagaaagaataagaataagatcaaggattatatggaacacgattattataaaataacaatagttcctggttcctcttccacgtctactagctcgtggtattatacacatgcctagtaatagtctctttgcgttgacggaaagcagactagaaataacaggctaaaatgttcagacaccataatagttcccaacccagataataacagagttccatcaacacattcctttaaactcaatcccaaacccaaaaccgttaaaatgtatccggccaattgatagtagataatgaggtgtacagcgcatgataatttacacagtaaccaaaatgaaaatactttagtaattataagaaatatagacggtaatgtcatcatcaacaatccgataatatgcctgagagtaaacattgacggataaaacaaaaatgctccgcataactctatcatggcaataacacaaccaaatacttgtaagattcctaaattagtagaaaatacaacgaatatcgatgtataagtgatctcgagaaataataagaataaagtaatgcccgtaaagataaacatcaacattgtttggtaatcattaaaccaattagtatgaagttgaactaatttcacagtagattttattccagtgttatcctcgcatgtataagtacctggtaagatatctttatattccataatcaatgagacatcactatctgataacgaatgaagtctagcactagtatgccatttacttaatattgtcgtcttggaagttttattataagttaaaatatcatggttatccaatttccatctaatatactttgtcggattatctatagtacacggaataatgatggtatcattacatgctgtatactctatggtctttgtagttgttataacaaccaacgtatagaggtatatcaacgatattctaactcttgacattttttatttatttaaaatgatacctttgttatttattttattctattttgctaacggtattgaatggcataagtttgaaacgagtgaagaaataatttctacttacttattagacgacgtattatacacgggtgttaatggggcggtatacacattttcaaataataaactaaacaaaactggtttaactaataataattatataacaacatctataaaagtagaggatgcggataaggatacattagtatgcggaaccaataacggaaatcccaaatgttggaaaatagacggttcagacgacccaaaacatagaggtagaggatacgctccttatcaaaatagcaaagtaacgataatcagtcacaacggatgtgtactatctgacataaacatatcaaaagaaggaattaaacgatggagaagatttgacggaccatgtggttatgatttattcacggcggataacgtaattccaaaagatggtttacgaggagcattcgtcgataaagacggtacttatgacaaagtttacattcttttcactgatactatcggctcaaagagaattgtcaaaattccgtatatagcacaaatgtgcctaaacgacgaaggtggtccatcatcattgtctagtcatagatggtcgacgtttctcaaagtcgaattagaatgtgatatcgacggaagaagttatagacaaattattcattctagaactataaaaacagataatgatacgatactatatgtattcttcgatagtccttattccaagtccgcattatgtacctattctatgaataccattaaacaatctttttctacgtcaaaattggaaggatatacaaagcaattgccgtctccagctcctggtatatgtttaccagctggaaaagttgttccacataccacgtttgaagtcatagaacaatataatgtactagatgatattataaagcctttatctaaccaacctatcttcgaaggaccgtctggtgttaaatggttcgatataaaggagaaggaaaatgaacatcgggaatatagaatatacttcataaaagaaaattctatatattcgttcgatacaaaatctaaacaaactcgtagctcgcaagtcgatgcgcgactattttcagtaatggtaactgcgaaaccgttatttatagcagatatagggataggagtaggaatgccacaaatgaaaaaaatacttaaaatgtaatcttaatcgagtacaccacacgacaatgaacaaacataagacagattatgctggttatgcttgctgcgtaatatgcggtctaattgtcggaattatttttacagcgacactattaaaagttgtagaacgtaaattagttcatacaccattaatagataaaacgataaaagatgcatatattagagaagattgtcctactgactggataagctataataataaatgtatccatttatctactgatcgaaaaacctgggaggaaggacgtaatgcatgcaaagctctaaattcaaattcggatctaattaagatagagactccaaacgagttaagttttttaagaagccttagacgaggctattgggtaggagaatccgaaatattaaaccagacaaccccatataattttatagctaagaatgccacgaagaatggaactaaaaaacggaaatatatttgtagcacaacgaatactcccaaactgcattcgtgttacactatataacaattacactacatttttatcataccactacttcggttagatgttttagaaaaaaataaatatcgccgtaccgttcttgtttttataaaaataacaattaacaattatcaaattttttctttaatattttacgtggttgaccattcttggtggtaaaataatctcttagtgttggaatggaatgctgtttaatgtttccacactcatcgtatattttgacgtatgtagtcacatcgtttacgcaatagtcagactgtagttctatcatgcttcctacatcagaaggaggaacagttttaaagtctcttggttttaatctattaccgttagttttcatgaaatcctttgttttatccacttcacattttaaataaatgtccactatacattcttttgttaattttactagatcgtcatgggtcatagaatttataggttccgtagtccatggatccaaactagcaaacttcgcgtatacggtatcgcgattagtgtatacaccaactgtatgaaaattaagaaaacagtttaataaatcaacagaaatatttaatcctccgtttgatacagatgcgccatatttatggatttcggattcacacgttgtttgtctgaggtgttcgtctagtgttgcttctacgtaaacttcgattcccatatattctttattgtcagaatcgcataccgatttatcatcatacactgtttgaaaactaaatggtatacacatcaaaataataaataataacgagtacattctgcaatattgttatcgtaattggaaaaatagtgttcgagtgagttggattatgtgagtattggattgtatattttattttatattttgtaataagaataaaatgctaatgtcaagtttattccaatagatgtcttattaaaaacatatataataaataacaatggctgaatggcataaaattatcgaggatatctcaaaaaataataagttcgaggatgccgccatcgttgattacaagactacaaagaatgttctagctgctattcctaacagaacatttgccaagattaatccgggtgaaattattcctctcatcactaatcgtaatattctaaaacctcttattggtcagaaatattgtattgtatatactaactctctaatggatgagaacacgtatgctatggagttgcttactgggtacgcccctgtatctccgatcgttatagcgagaactcataccgcacttatatttttgatgggtaagccaacaacatccagacgtgacgtgtatagaacgtgtagagatcacgctacccgtgtacgtgcaactggtaattaaaataaaaagtaatattcatatgtagtgtcaattttaaatgatgatgatgaaatggataatatccatattgacgatgtcaataatgccggtattggcatacagttcatcgatttttagatttcattcagaggatgtggaattatgttatgggcatttgtattttgataggatctataatgtagtaaatataaaatataatccgcatattccatatagatataattttattaatcgcacgttaaccgtagatgaactagacgataatgtcttttttacacatggttattttttaaaacacaaatatggttcacttaatcctagtttgattgtctcattatcaggaaacttaaaatataatgatatacaatgctcagtaaatgtatcgtgtctcattaaaaatttggcaacgagtacatctactatattaacatctaaacataagacttattctctacatcggtccacgtgtattactataataggatacgattctattatatggtataaagatataaatgacaagtataatgacatctatgattttactgcaatatgtatgctaatagcgtctacattgatagtgaccatatacgtgtttaaaaaaataaaaatgaactcttaattatgctatgctattagaaatggataaaatcaaaattacggttgattcaaaaattggtaatgttgttaccatatcgtataacttggaaaagataactattgatgtcacacctaaaaagaaaaaagaaaaggatgtattattagcgcaatcagttgctgtcgaagaggcaaaagatgtcaaggtagaagaaaaaaatattatcgatattgaagatgacgatgatatggatgtagaaagcgcgtaatacgatctataaaaataagtatataaatactttttatttactgtactcttactgtgtagtggtgataccctactcgattatttttttaaaaaaaaaatacttattctgattcttctagccatttccgtgttcgtttgaatgccacatcgacgtcaaagataggggagtagttgaaatctagttctgcattgttggtacgcacctcaaatgtagtgttggatatcttcaacgtatagttgttgagtagtgatggttttctaaatagaattctcttcatatcattcttgcacgcgtacatttttagcatccatcttggaatcctagatccttgttctattcccaatggtttcatcaatagaagattaaacatatcgtacgaacacgatggagagtaatcgtagcaaaagtaagcatttcctttaatcttagatcccggatactggatatattttgcagccaacacgtgcatccatgcagcatttcctacatatacccggctatgcaccgcgtcatcatcgactgtacgatacataatgttaccgtgttgcttacattgctcgtaaaagactttcatcaatttgtctccttctccgtaaattccagtgggtcttaggcaacaagtatacaattttgctccattcatgattacggaattattggctttcataaccagttgctcggccatacgtttactttttgcgtatacatgtcctggtgatatatcataaagggtatgctcatggccgatgaatggatcaccgtgtttattgggtcctattgcttccatgctactagtatagatcaaatacttgattcctaggtccacacaagctgccaaaatagtctgtgttccataatagtttactttcatgatttcattatcggtgtattttccaaatacatccactagagcagccgtatgaataatcagatttaccccatctagcgcttctctcaccttatcaaagtcgtttatatcacattgtatatagtttataaccttaactttcgaggttattggttgtggatcttctacaatatctatgactctgatttcttgaacatcatctgcactaattaacagttttactatatacctgcctagaaatccggcaccaccagtaaccgcgtacacggccattgctgccactcataatatcagactacttattctattttactaaataatggctgtttgtataatagaccacgataatatcagaggagttatttactttgaaccagtccatggaaaagataaagttttaggatcagttattggattaaaatccggaacgtatagtttgataattcatcgttacggagatattagtcaaggatgtgattccataggcagtccagaaatatttatcggtaacatctttgtaaacagatatggtgtagcatatgtttatttagatacagatgtaaatatatttacaattattggaaaggcgttatctatttcaaaaaatgatcagagattagcgtgtggagttattggtatttcttacataaatgaaaagataatacattttcttacaattaacgagaatggcgtttgatatatcagttaatgcgtctaaaacaataaatgcattagtttacttttctactcagcaaaataaattagtcatacgtaatgaagttaatgatacacactacactgtcgaatttgatagggacaaagtagttgacacgtttatttcatataatagacataatgacaccatagagataagaggggtgcttccagaggaaactaatattggttgcgcggttagtatgacttacttgtataataagtatagttttaaactgattttagcagaatatataagacacagaaatactatatccggcaatatttattcggcattgatgacactagatgatttggctattaaacagtatggagacattgatctattatttaatgagaaacttaaagtagactccgattcgggactatttgactttgtcaactttgtaaaggatatgatatgttgtgattctagaatagtagtagctctatctagtctagtatctaaacattgggaattgacaaataaaaaatataggtgtatggcattagccgaacatatatctgatagtattccaatatctgagctatctagactacgatacaatctatgtaagtatctacgcggacacactgagagcatagaggataaatttgattattttgaagacgatgattcgtctacatgttctgccgtaaccgacagggaaacggatgtataattttttttatagcgtgaaggatatgataaaaaatataattgttgtatttatcccattccaatcaccttatatgattctgtaacacaataaaggagtcttatagatgtatagaggtcagatactggtttgataaactgtttattccacataagtatgtttgactttatggttagacccgcatactttaacaaatcactgaaaattggagttaggtattgacctctcagaatcagttgccgttctggaacattaaatgtattttttatgatatactccaacgcatttatgtgggcatacaacaagtcattactaatggaatattccaagagttttagttgtctagtatttaacaagagaagagatttcaacagactgtttatgaactcgaatgccgcctcattgtcgcttatattgatgatgtcgaattctcccaatatcatcaccgatgagtagctcatcttgttatcgggatccaagttttctaaagatgtcattaaaccctcgatcatgaatggatttatcatcatcgtttttatgttggacatgagcttagtccgtttgtccacatctatagaagatgatttctgaattatttcatatatctctctctttaactccaggaacttgtcaggatggtctactttaatatgttctcgtctaagagatgaaaatctttggatggttgcacgcgacttttctctaaaggatgacgttgcccaagatcctctcttaaatgaatccatcttatccttggacaagatggacagtctattttccttagatggtttaatatttttgttacccatgatctataaaggtagacctaatcgtctcggatgaccatatatttattttcagttttattatacgcataaattgtaaaaaatatgttaggtttacgaaaatgtctcgtggggcattaatcgtttttgaaggattggacaaatctggaaaaacaacacaatgtatgaacatcatggaatcaataccttcaaacacaataaaataccttaactttcctcagagatccactgtcactggaaagatgatagatgactatctaactcgtaaaaaaacctataatgatcatatagttaatctattattttgtgcaaatagatgggagtttgcatcttttatacaagaacaactagaacagggaattactttaatagttgatagatacgcattttctggagtagcgtatgccgccgctaaaggcgcgtcaatgactctcagtaagagttatgaatctggattgcctaaacccgacttagttatattcttggaatctggtagcaaagaaattaatagaaacgtcggtgaggaaatttatgaagatgttacattccaacaaaaggtattacaagaatataaaaaaatgattgaagaaggagatattcattggcaaattatttcttctgaattcgaggaagatgtaaagaaggagttgattaagaatatagttatagaggctatacacacggttactggaccagtggggcaactgtggatgtaatagtgaaattacattttttataaatagatgttagtacagtgttataaatggatgaagcatattactctggcaacttggaatcagtactcggatacgtgtccgatatgcataccgaactcgcatcaatatctcaattagttattgccaagatagaaactatagataatgatatattaaacaaggacattgtaaattttatcatgtgtagatcaaacttggataatccatttatctctttcctagatactgtatatactattatagatcaagagaactatcagactgagttgattaattcattagacgacaatgaaattatcgattgtatagttaataagtttatgagcttttataaggataacctagaaaatatagtagatgctatcattactctaaaatatataatgaataatccagattttaaaactacgtatgccgaagtactcggttccagaatagccgatatagatattaaacaagtgatacgtaagaatatactacaattgtctaataatatccgcgaacgatatttgtgaaaatattaaaaaaaaatactttttttattaaatgacgtcttttcgtgaatttagaaaattatgctgtgctatatatcacgcatcaggatataaagaaaaatctaaattaattagagactttataacagatagggatgataaatatttgatcattaagctattgcttcccggattagacgatagaatttataacatgaacgataaacaaattataaaattatatagtataatatttaaacaatctcaggaagatatgctacaagatttaggatacggatatataggagacactattaggactttcttcaaagagaacacagaaatccgtccacgagataaaagcattttaactttagaagaagtggatagttttttaactacgttatcatccgtaactaaagaatcgcatcaaataaaattattgactgatgtagcatctgtttgtacatgtaatgatttaaaatgtgtagtcatgcttattgataaagatctaaaaattaaagcgggtcctcggtacgtacttaacgctattagtcctaatgcctatgatgtgtttagaaaatctaataacttgaaagagataatagaaaattcatctaaacaaaatctagactctatatctatttctgttatgactccaattaatcccatgttagcggaatcgtgtgattctgtcaataaggcgtttaaaaaatttccatcaggaatgtttgcggaagtcaaatacgatggtgaaagagtacaagttcataaaaataataacgagtttgccttctttagtagaaacatgaaaccagtactctctcataaagtggattatctcaaagaatacataccgaaagcatttaaaaaagctacgtctatcgtattggattctgaaattgttcttgtagacgaacataatgtaccgctcccgtttggaagtttaggtatacacaaaaagaaagaatataaaaactctaacatgtgtttgttcgtgtttgactgtttgtactttgatggattcgatatgacggacattccattgtacgaacgaagatcttttctcaaagatgttatggttgaaatacccaatagaatagtattctcagagttgacgaatattagtaacgagtctcagttaactgacgtattggatgatgcactaacgagaaaattagaaggattggtcttaaaagatattaatggagtatacgaaccgggaaagagaagatggttaaaaataaagcgagactatttgaacgagggttccatggcagattctgccgatttagtagtactaggtgcctactatggtaaaggagcaaagggtggtatcatggcagtctttctaatgggttgttacgacgatgaatccggtaaatggaagacggttaccaagtgttcaggacacgatgataatacgttaagggagttgcaagaccaattaaagatgattaaaattaacaaggatcccaaaaaaattccagagtggttagtagttaataaaatctatattcccgattttgtagtagaggatccgaaacaatctcagatatgggaaatttcaggagcagagtttacatcttccaagtcccataccgcaaatggaatatccattagatttcctagatttactaggataagagaggataaaacgtggaaagaatctactcatctaaacgatttagtaaacttgactaaatcttaatagttacatacaaactgaaaattaaaataacactatttagttggtggtcgccatggatggtgttattgtatactgtctaaacgcgctagtaaaacatggcgaggaaataaatcatataaaaaatgatttcatgattaaaccatgttgtgaaagagtttgtgaaaaagtcaagaacgttcacattggcggacaatctaaaaacaatacagtgattgcagatttgccatatatggataatgcggtatccgatgtatgcaattcactgtataaaaagaatgtatcaagaatatccagatttgctaatttgataaagatagatgacgatgacaagactcctactggtgtatataattattttaaacctaaagatgccattcctgttatcatatctataggaaaggataaagatgtctgtgaactattaatctcatcagacatatcgtgtgcatgcgtggagttaaattcatatcacgtagccattcttcccatggatgtttccttttttaccaaaggaaatgcatcattgattattctcctgtttgatttctctatcgatgcggcacctctcttaagaagtgtaaccgataataatgttattatatctagacaccagcgtctacatgacgagcttccgagttccaattggttcaagttttacataagtataaagtccgactattgttctatattatatatggttgttgatggatctgtgatgcatgcgatagctgataatagaactcacgcaattattagcaaaaatatattagacaatactacgattaacgatgagtgtagatgctgttattttgaaccacagattaggattcttgatagagatgagatgctcaatggatcatcgtgtgatatgaacagacattgtattatgatgaatttacctgatgtaggcgaatttggatctagtatgttggggaaatatgaacctgacatgattaagattgctctttcggtggctggtaatttaataagaaatcgagactacattcccgggagacgaggatatagctactacgtttacggtatagcctctagataatttttttaagcacgaaataaaaaacataattttaaaccaatctatttcatactattttgtgtgatcaccatggacataaagatagatattagtatttctggtgataaatttacggtgactactaggagggaaaatgaagaaagaaaaaaatatctacctctccaaaaagaaaaaactactgatgttatcaaacctgattatcttgagtacgatgacttgttagatagagatgagatgtttactattctagaggaatattttatgtacagaggtctattaggcctcagaataaaatatggacgactctttaacgaaattaaaaaattcgacaatgatgcggaagaacaattcggtactatagaagaactcaagcagaaacttagattaaattctgaagagggagcagataactttatagattatataaaggtacaaaaacaggatatcgtcaaacttactgtatacgattgcatatctatgataggattgtgtgcatgcgtggtagatgtttggagaaatgagaaactgttttctagatggaaatattgtttacgagcgattaaactgtttattgatgatcacatgcttgataagataaaatctatactgcagaatagactagtatatgtggaaatgtcatagaaagttaaaagttaatgagagcaaaaatatataaggttgtattccatatttgttatttttttctgtaatagttagaaaaatacattcgatggtctatctatcagattattatgtgttataaggtactttttctcataataaactagagtatgagtaagatagtgtttttcaaaacatataaatctaaaattgatggatgagatatacagctattaatttcgaaaatatattttaatctgataactttaaacatggatttttaatggtggtttaacgttttaaaaaaagattttgttattgtagtatatgataatattaaaagatggatataaagaatttgctgactgcatgtactattttttacattactacattggctacggcagatatacctacttcgtcactgccacacgctccggtaaacggggcatgtgacgagggagaatatcttgataagaggcataatcaatgttgtaatcagtgtccacctggagaatttgccaaggttagatgtaatggtaacgataacacaaaatgtgaacgctgcccacctcatacatataccgcaatccccaattactctaatggatgtcatcaatgtagaaaatgcccaacaggatcatttgataaggtaaagtgtaccggaacacagaacagtaaatgttcgtgtcttcctggttggtattgcgctactgattcttcacagactgaagattgtcgagattgtataccaaaaaggagatgtccatgcggatactttggtggaatagatgaacaaggaaatcctatttgtaaatcgtgttgtgttggtgaatattgcgactacctacgtaattatagacttgatccatttcctccatgcaaactatctaaatgtaattaattatgattttgatgataatgttaccatacattatatcgctacttggttagtgtattattcagtatgaagacctattaataattacttatcttttgacgatcttgttataattataatataaaaatacttatggcatagtaactcataattgctgacgcgataaattcgtaataatctgttttgttcaaatttttataaggaatctacaggcataaaaataaaaatataatttataatatactcttacagcgcgccatcatgaataacagcagtgaattgattgctgttattaatggatttagaaatagtggacgattttgtgatattaatatagttattaatgatgaaaggataaacgctcacagactcatcctatctggagcctccgaatatttttccattctgttttccaataattttatcgattctaatgaatacgaagttaatctaagtcatttagattatcaaagtgttaacgatttgatcgattacatttatgggatacctttgagcctaactaacgataacgtgaaatatattctttcaaccgctgattttttacaaattggatctgctattacggagtgtgaaaattacatacttaaaaatctttgttctagaaactgtatcgatttctacatatacgctgataaatataataacaagaaaatagaatcagcgtcgtttaacacaatattacaaaatattttgagactcatcaacgatgaaaactttaaatacttaacagaggaatcaatgataaaaattttaagcgatgatatgttaaatataaaaaatgaggatttcgccccactaattctcattaaatggttagagagtactcaacaaccatgcaccgtcgagttacttaaatgcctcagaatatcattgctttccccacaagttataaaatcactttatagtcatcgactggttagttcaatctacgaatgtataacattcttaaacaatatagcattcttggatgaatcatttcctagataccatagcatcgagttgatatctatcggtataagtaattcgcatgataagatttccataaactgctacaatcataaaaaaaatacatgggaaatgatatcttcacgtagatataggtgtagtttcgcagtggccgtcctggataatattatctatatgatgggtggatatgatcagtccccgtatagaagttcaaaggttatagcgtacaatacatgtacaaattcttggatatatgatataccagagctaaaatatcctcgttctaattgtgggggactggctgatgacgaatacatttattgtataggcggcatacgcgatcaggattcatcgttgacatctagtattgatagatggaagccatcaaaaccatattggcagaagtatgctaaaatgcgcgaaccaaaatgtgatatgggggttgcgatgttaaacggattaatatatgttataggtggaatcgttaaaggtgacacgtgtaccgacgcactagagagtttatcagaagatggatggatgaagcatcaacgtcttccaataaaaatgtccaatatgtcgacgattgttcatgatggcaagatttatatatctggaggttacaacaatagtagtgtagttaatgtaatatcgaatctagtccttagctataattcgatatatgatgaatggaccaaattatcatcattaaacattcctagaattaatcccgctctatggtcagcgcataataaattatatgtaggaggaggaatatctgatgatgttcgaactaatacatctgagacatacgacaaagaaaaagattgttggacattggataatggtcacgtgttaccacgcaattatataatgtataaatgcgaaccgattaaacataaatatccattggaaaaaacacagtacacgaatgattttctaaagtatttggaaagttttataggtagttgatagaacaaaatacataattttgtaaaaataaatcactttttatactaatatgacacgattaccaatacttttgttactaatatcattagtatacgctacaccttttcctcagacatctaaaaaaataggtgatgatgcaactctatcatgtaatcgaaataatacaaatgactacgttgttatgagtgcttggtataaggagcccaattccattattcttttagctgctaaaagcgacgtcttgtattttgataattataccaaggataaaatatcttacgactctccatacgatgatctagttacaactatcacaattaaatcattgactgctagagatgccggtacttatgtatgtgcattctttatgacatcaactacaaatgacactgataaagtagattatgaagaatactccacagagttgattgtaaatacagatagtgaatcgactatagacataatactatctggatctacacattcaccggaaactagttctgagaaacctgattatatagataattctaattgctcgtcggtattcgaaatctaagctcttttttttttttttttttttggcatataaataagtcgaccaccatggtgggtgaggatagcgtgctgatcaccgagaacatgcacatgaaactgtacatggagggcaccgtgaacgaccaccacttcaagtgcacatccgagggcgaaggcaagccctacgagggcacccagaccatgaagatcaaggtggtcgagggcggccctctccccttcgccttcgacatcctggctaccagcttcatgtacggcagcaaaacctttatcaaccacacccagggcatccccgacttctttaagcagtccttccctgagggcttcacatgggagaggatcaccacatacgaagacgggggcgtgctgaccgctacccaggacaccagcctccagaacggctgcctcatctacaacgtcaagatcaacggggtgaacttcccatccaacggccctgtgatgcagaagaaaacactcggctgggaggccagcaccgagatgctgtaccccgctgacagcggcctgagaggccatagccagatggccctgaagctcgtgggcgggggctacctgcactgctccctcaagaccacatacagatccaagaaacccgctaagaacctcaagatgcccggcttctacttcgtggacaggagactggaaagaatcaaggaggccgacaaagagacctacgtcgagcagcacgagatggctgtggccaggtactgcgacctgcctagcaaactggggcacagctgattaattaatttttatcgatctaattcaacaatgtctggagagcttcgcaggatcccgactccggaaccaattactgataaagaagatcatacagttacagacactgtctcatacactacagtaagtacatcatctggaattgtcactactaaatcaaccaccgatgatgcggatctttatgatacgtacaatgataatgatacagtaccaccaactactgtaggcggtagtacaacctctattagcaattataaaaccaaggactttgtagaaatatttggtattaccgcattaattatattgtcggccgtggcaattttctgtattacatattatatatataataaacgttcacgtaaatacaaaacagagaacaaagtctagatttttgacttacataaatgtctgggatagtaaaatctatcatattgagcggaccatctggtttaggaaagacagccatagccaaaagactatgggaatatatttggatttgtggtgtcccataccactagatttcctcgtcctatggaacgagaaggtgttgattaccattacgttaacagagaggccatctggaagggaatagccgccggaaactttctagaacatactgagtttttaggaaatatttacggaacttctaaaacagctgtgaatacagcggctattaataatcgtatttgtgtgatggatctaaacatcgacggtgttagaagtcttaaaaatacgtacctaatgccttactcggtgtatataagacctacctctcttaaaatggttgagaccaagcttcgtcgtagaaacactgaagctaacgatgagattcatcgtcgtgtgatgttggcaaaaactgacatggatgaggcaggtgaagccggtctattcgacactattatcattgaagatgatgtgaatttagcatatagtaagttaattcagatactacaggaccgtattagaatgtattttaacactaattagagacttaagacttaaaacttgataattaataatataactcgtttttatatgtgtctatttcaacgtctaatgtattagttaaatattaaaacttaccacgtaaaacttaaaatttaaaatgatatttcattgacagatagatcacacattatgaactttcaaggacttgtgttaactgacaattgcaaaaatcaatgggtcgttggaccattaataggaaaaggtggattcggtagtatttatactactaatgacaataattatgtagtaaaaatagagcccaaagctaacggatcattatttaccgaacaggcattttatactagagtacttaaaccatccgttatcgaagaatggaaaaaatctcacaatataaagcacgtaggtcttatcacgtgcaaggcatttggtctatacaaatccattaatgtggaatatcgattcttggtaattaatagattaggtgcagatctagatgcggtgatcagagccaataataatagactaccaaaaaggtcggtgatgttgatcggaatcgaaatcttaaataccatacaatttatgcacgagcaaggatattctcacggagatattaaagcgagtaatatagtcttagatcaaatagataagaataaattatatctagtggattacggattggtttctaaattcatgtctaatggcgaacatgttccatttataagaaatccaaataaaatggataacggtactctagaatttacacctatagattcgcataaaggatacgttgtatctagacgtggagatctagaaacacttggatattgtatgattagatggttgggaggtatcttaccatggactaagatatctgaaacaaagaattgtgcattagtaagtgccacaaaacagaaatatgttaacaatactgcgactttgttaatgaccagtttgcaatatgcacctagagaattgctgcaatatattaccatggtaaactctttgacatattttgaggaacccaattacgacaagtttcggcacatattaatgcagggtgtatattattaagtgtggtgtttggtcgataaaaattaaaaaataacttaatttattattgatctcgtgtgtacaaccgaaatcatggcgatgttttacgcacacgctctcggtgggtacgacgagaatcttcatgcctttcctggaatatcatcgactgttgccaatgatgtcaggaaatattctgttgtgtcagtttataataacaagtatgacattgtaaaagacaaatatatgtggtgttacagtcaggtgaacaagagatatattggagcactgctgcctatgtttgagtgcaatgaatatctacaaattggaaatccgatccatgatcaagaaggaaatcaaatctctatcatcacatatcgccacaaaaactactatgctctaagcggaatcgggtacgagagtctagacttgtgtttggaaggagtagggattcatcatcacgtacttgaaacaggaaacgctgtatatggaaaagttcaacatgattattctactatcaaagagaaggccaaagaaatgagtgcacttagtccaggacctatcatcgattaccacgtctggataggagattgtatctgtcaagttactgctgtggacgtacatggaaaggaaattatgaaaatgagattcaaaaagggtgcggtgcttccgatcccaaatctggtaaaagttaaacttggggagaatgatacagaaaatctttcttctactatatcggcggcaccatcgaggtaaccacctctctggaagacagcgtgaatcatgtactcatgaaacgtttggaaactatacgccatatgtggtctgttgtatatgatcattttgatattgtgaatggtaaagaatgctgttatgtgcatacgcattcatctaatcaaaatcctataccgagtactgtaaaaacaaatttgtacatgaagactatgggatcatgcattcaaatggattccatggaagctctagagtatcttagcgaactgaaggaatcaggtggatggagtcccagaccagaaatgcaggaatttgaatatccagatggagtggaagacactgaatcaattgagagattggcagaggagttcttcaatagatcagaacttcaggctggtgaatcagtcaaatttggtaattctattaattgttaaacatacatctgtttcagctaagcaactaagaacacgtatacggcagcagcttccttctatactctcatcttttaccaacacaaagggtggatatttgttcattggagttgataataatacacacaaagtatttggattcacggtgggttacgactacctcagactgatagagaatgatatagaaaagcatatcaaaagacttcgtgttgtgcatttctgtgagaagaaagaggacatcaagtacgcgtgtcgattcatcaaggtatataaacctggggatgagactacctcgacatacgtgtgcgctatcaaagtggaaagatgctgttgtgctgtgtttgcagattggccagaatcatggtatatggatactaatggtatcaagaagtattctccagatgaatgggtgtcacatataaaattttaattaatgtaactatagagaacaaataataaggttgtaatatcatatagacaataactaacaattaattagtaactgttatctcttttttaactaaccaactaactatatacctattaatacatcgtaattatagttcttaacatctattaatcattaattcgcttctttaattttttataaactaacattgttaattgaaaagggataacatgttacagaatataaattatatatggatttttttaaaaaggaaatacttgactggagtatatatttatctcttcattatatagcacgcgtgttttccaatttttccacatcccatataatacaggattataatctcgttcgaacatacgagaaagtggataaaacaatagttgattttttatctaggttgccaaatttattccatattttagaatatggggaaaatattctacatatttattctatggatgatgctaatacgaatattataattttttttctagatagagtattaaatattaataagaacgggtcatttatacacaatctcgggttatcatcatccattaatataaaagaatatgtatatcaattagttaataatgatcatccagataataggataagactaatgcttgaaaatggacgtagaacaagacattttttgtcctatatatcagatacagttaatatctatatatgtattttaataaatcatggattttatatagatgccgaagacagttacggttgtacattattacatagatgtatatatcactataagaaatcagaatcagaatcatacaatgaattaattaagatattgttaaataatggatcagatgtagataaaaaagatacgtacggaaacacaccttttatcctattatgtaaacacgatatcaacaacgtggaattgtttgagatatgtttagagaatgctaatatagactctgtagactttaatagatatacacctcttcattatgtctcatgtcgtaataaatatgattttgtaaagttattaatttctaaaggagcaaatgttaatgcgcgtaataaattcggaactactccattttattgtggaattatacacggtatctcgcttataaaactatatttggaatcagacacagagttagaaatagataatgaacatatagttcgtcatttaataatttttgatgctgttgaatctttagattatctattatccagaggagttattgatattaactatcgtactatatacaacgaaacatctatttacgacgctgtcagttataatgcgtataatacgttggtctatctattaaacaaaaatggtgattttgagacgattactactagtggatgtacatgtatttcggaagcagtcgcaaacaacaacaaaataataatggaagtactattgtctaaacgaccatctttgaaaattatgatacagtctatgatagcaattactaaacataaacagcataatgcagatttattgaaaatgtgtataaaatatactgcgtgtatgaccgattatgatactcttatagatgtacagtcgctacagcaatataaatggtatattttaagatgtttcgatgaaatagatatcatgaagagatgttatataaaaaataaaactgtattccaattagttttttgtatcaaagacattaatactttaatgagatacggtaaacatccttctttcgtgaaatgcactagtctcgacgtatacggaagtcgtgtacgtaatatcatagcatctattagatatcgtcagagattaattagtctattatccaagaagctggatcctggagataaatggtcgtgttttcctaacgaaataaaatataaaatattggaaaactttaacgataacgaactatccacatatctaaaaatcttataaacattattaaaatataaaatctaagtaggataaaatcacactacatcattgtttccttttagtgctcgacagtgtatactatttttaacgctcataaataaaaatgaaaacgatttccgttgttacgttgttatgcgtactacctgctgttgtttattcaacatgtactgtacccactatgaataacgctaaattaacgtctaccgaaacatcgtttaatgataaccagaaagttacgtttacatgtgatcagggatatcattctttggatccaaatgctgtctgtgaaacagataaatggaaatacgaaaatccatgcaaaaaaatgtgcacagtttctgattatgtctctgaactatataataaaccgctatacgaagtgaattccaccatgacactaagttgcaacggcgaaacaaaatattttcgttgcgaagaaaaaaatggaaatacttcttggaatgatactgttacgtgtcctaatgcggaatgtcaacctcttcaattagaacacggatcgtgtcaaccagttaaagaaaaatactcatttggggaatatatgactatcaactgtgatgttggatatgaggttattggtgcttcgtacataagttgtacagctaattcttggaatgttattccatcatgtcaacaaaaatgtgatatgccgtctctatctaacggattaatttccggatctacattttctatcggtggcgttatacatcttagttgtaaaagtggttttacactaacggggtctccatcatccacatgtatcgacggtaaatggaatcccatactcccaatatgtgtacgaactaacgaaaaatttgatccagtggatgatggtcccgacgatgagacagatttgagcaaactctcgaaagacgttgtacaatatgaacaagaaatagaatcgttagaagcaacttatcatataatcatagtggcgttgacaattatgggcgtcatatttttaatctccgttatagtattagtttgttcctgtgacaaaaataatgaccaatataagttccataaattgctaccgtaaatataaatccgttaaaataattaataatttaataacaaacaagtatcaaaagattaaagacttatagctagaatcaattgagatgtcttcttcagtggatgttgatatctacgatgccgttagagcatttttactcaggcactattataacaagagatttattgtgtatggaagaagtaacgccatattacataatatatacaggctatttacaagatgcgccgttataccgttcgatgatatagtacgtactatgccaaatgaatcacgtgttaaacaatgggtgatggatacacttaatggtataatgatgaatgaacgcgatgtttctgtaagcgttggcaccggaatactattcatggaaatgtttttcgattacaataaaaatagtatcaacaatcaactaatgtatgatataattaatagcgtatctataattctagctaatgagagatatagaagcgcttttaacgacgatggtatatacatccgtagaaatatgattaacaagttgtacggatacgcatctctaactactattggcacgatcgctggaggtgtttgttattatctgttgatgcatctagttagtttgtataaataattatttcaatatactagttaaaattttaagattttaaatgtataaaaaactaataacgtttttatttgtaataggtgcattagcatcctattcgaataatgagtacactccgtttaataaactgagtgtaaaactctatatagatggagtagataatatagaaaattcatatactgatgataataatgaattggtgttaaattttaaagagtacacaatttctattattacagagtcatgcgacgtcggatttgattccatagatatagatgttataaacgactataaaattattgatatgtataccattgactcgtctactattcaacgcagaggtcacacgtgtagaatatctaccaaattatcatgccattatgataagtacccttatattcacaaatatgatggtgatgagcgacaatattctattactgcagagggaaaatgctataaaggaataaaatatgaaataagtatgatcaacgatgatactctattgagaaaacatactcttaaaattggatctacttatatatttgatcgtcatggacatagtaatacatattattcaaaatatgatttttaaaaatttaaaatatattatcacttcagtgacagtagtcaaataacaaacaacaccatgagatatattataattctcgcagttttgttcattaatagtatacatgctaaaataactagttataagtttgaatccgtcaattttgattccaaaattgaatggactggggatggtctatacaatatatcccttaaaaattatggcatcaagacgtggcaaacaatgtatacaaatgtaccagaaggaacatacgacatatccgcatttccaaagaatgatttcgtatctttctgggttaaatttgaacaaggcgattataaagtggaagagtattgtacgggactatgcgtcgaagtaaaaattggaccaccgactgtaacattgactgaatacgacgaccatatcaatttgtacatcgagcatccgtatgctactagaggtagcaaaaagattcctatttacaaacgcggtgacatgtgtgatatctacttgttgtatacggctaacttcacattcggagattctaaagaaccagtaccatatgatatcgatgactacgattgcacgtctacaggttgcagcatagactttgtcacaacagaaaaagtgtgcgtgacagcacagggagccacagaagggtttctcgaaaaaattactccatggagttcgaaagtatgtctgacacctaaaaagagtgtatatacatgcgcaattagatccaaagaagatgttcccaatttcaaggacaaaatggccagagttatcaagagaaaatttaatacacagtctcaatcttatttaactaaatttctcggtagcacatcaaatgatgttaccacttttcttagcatgcttaacttgactaaatattcataactaatttttattaatgatacaaaaacgaaataaaactgcatattatacactggttaacgcccttataggctctaaccattttcaagatgaggtccctgattatagtccttctgttcccctctatcatctactccatgtctattagacgatgtgagaagactgaagaggaaacatggggattgaaaatagggttgtgtataattgccaaagatttctatcccgaaagaactgattgcagtgttcatctcccaactgcaagtgaaggattgataactgaaggcaatggattcagggatatacgaaacaccgataaattataaaaaaagcaatgtgtccgctgtttccgttaataatactattttcgtaactggcggattattcataaataactctaatagcacgatcgtggttaacaatatggaaaaacttgacatttataaagacaaacaatggtcgattatagaaatgcctatggctagggtatatcacggcattgactcgacatttggaatgttatattttgccggaggtctatccgttaccgaacaatatggtaatttagagaaaaacaacgagatatcttgttacaatcctagaacgaataagtggtttgatatttcatatactatttataagatatccatatcatcattgtgtaaactaaataacgtcttctatgtatttagtaaggacattggatatgtggaaaagtatgatggtgcatggaagttagtacatgatcgtctccccgctataaaggcattatcaacttctccttattgattgaaaatgaaaatataaatagtttttatgtatagcagtattaccctatagttttattgcttactactaacatggatacagatgttacaaatgtagaagatatcataaatgaaatagatagagagaaagaagaaatactaaaaaatgtagaaattgaaaataataaaaacattaacaagaatcatcccaatgaatatattagagaagcactcgttattaataccagtagtaatagtgattccattgataaagaagttatagaatgtatcagtcacgatgtaggaatatagatcatatctactaatttttataatcgatacaaaacataaaaaacaactcgttattacatagcaggcatggaatccttcaagtattgttttgataacgatggcaagaaatggattatcggaaatactttatattctggtaattcaatactctataaggtcagaaaaaatttcactagttcgttctacaattacgtaatgaagatagatcacaaatcacacaagccattgttgtctgaaatacgattctatatatctgtattggatcctttgactatcgacaactggacacgggaacgtggtataaagtatttggctattccagatctgtatggaattggagaaaccgatgattatatgttcttcgttataaagaattcgggaagagtattcgccccaaaggatactgaatcagtcttcgaagcatgcgtcactatgataaacacgttagagtttatacactctcgaggatttacccatggaaaaatagaaccgaggaatatactgattagaaataaacgtctttcactaattgactattctagaactaacaaactatacaagagtggaaactcacatatagattacaacgaggacatgataacttcaggaaatatcaattatatgtgtgtagacaatcatcttggagcaacagtttcaagacgaggagatttagaaatgttgggatattgcatgatagaatggttcggtggcaaacttccatggaaaaacgaaagtagtataaaagtaataaaacaaaaaaaagaatataaaaaatttatagctactttctttgaggactgttttcctgaaggaaatgaacctctggaattagttagatatatagaattagtatacacgttagattattctcaaactcctaattatgacagactacgtaaactgtttatacaagattgaaattatattcttttttttatagagtgtggtagtgttacggatatctaatattaatattagactatctctatcgcgctacacgaccaatatcgattactatggatatcttctatgaaaggagagaatgtatttatttctccagcgtcaatctcgtcagtattgacaatactgtattatggagctaatggatccactgctgaacagctatcaaaatatgtagaaacggaggagaacacggataaggttagcgctcagaatatctcattcaaatccatgaataaagtatatgggcgatattctgccgtgtttaaagattcctttttgagaaaaattggcgataagtttcaaactgttgacttcactgattgtcgcactatagatgcaatcaacaagtgtgtagatatctttactgaggggaaaatcaatccactattggatgaaccattgtctcctagcaattagtgccgtatactttaaagcaaaatggttgacgccattcgaaaaggaatttaccagtgattatcccttttacgtatctccgacggaaatggtagacgtaagtatgatgtctatgtacggcaaggcatttaatcacgcatctgtaaaagaatcattcggcaacttttcaatcatagaactgccatatgttggagatactagtatgatggtcattcttccagacaagattgatggattagaatccatagaacaaaatctaacagatacaaattttaagaaatggtgtgactttatggatgctatgtttatagatgttcacattcccaagtttaaggtaacaggctcgtataatctggtggatactctagtaaagtcaggactgacagaggtgttcggttcaactggagattatagcaatatgtgtaatttagatgtgagtgtcgacgctatgatccacaaaacgtatatagatgtcaatgaagagtatacagaagcagctgcagcaacttctgtactagtggcagactgtgcatcaacaattacaaatgagttctgtgcagatcatccgttcatctatgtgattaggcatgttgatggaaaaattcttttcgttggtagatattgctctccgacaactaattgttaaccattttttttaaaaaaaatagaaaaaacatgtggtattagtgcaggtcgttgttcttccaattgcaattggtaagatgacggccaactttagtacccacgtcttttcaccacagcactgtggatgtgacagactgaccagtattgatgacgtcaaacaatgtttgactgaatatatttattggtcgtcctatgcataccgcaacaggcaatgcgctggacaattgtattccacactcctctcttttagagatgatgcggaattagtgttcatcgacattcgcgagctggtaaaaaatatgccgtgggatgatgtcaaagattgtacagaaatcatccgttgttatataccggatgagcaaaaaaccatcagagagatttcggccatcatcggactttgtgcatatgctgctacttactggggaggtgaagaccatcccactagtaacagtctgaacgcattgtttgtgatgcttgagatgctaaattacgtggattataacatcatattccggcgtatgaattgatgagttgtacatcttgacattttctttcttctcttctccctttcttctcttctcccttcctccctcttctccctttcccagaaacaaacttttttacccactataaaataaaatgagtatactacctattatatttcttcctatatttttttattcttcattcgttcagacttttaacgcgtctgaatgtatcgacaaagggcaatattttgcatcattcatggagttagaaaacgagccagtaatcttaccatgtcctcaaataaatacgctatcatccggatataatatattagatattttatgggaaaaacgaggagcggataatgatagaattataccgatagataatggtagcaatatgctaattctgaacccgacacaatcagactctggtatttatatatgcattaccacgaacgaaacctactgtgacatgatgtcgttaaatttgacaatcgtgtctgtctcagaatcaaatatagatcttatctcgtatccacaaatagtaaatgagagatctactggcgaaatggtatgtcccaatattaatgcatttattgctagtaacgtaaacgcagatattatatggagcggacatcgacgccttagaaataagagacttaaacaacggacacctggaattattaccatagaagatgttagaaaaaatgatgctggttattatacatgtgttttagaatatatatacggtggcaaaacatataacgtaaccagaattgtaaaattagaggtacgggatagaataataccttctactatgcaattaccagatggcattgtaacttcaataggtagtaatttgactattgcatgcagagtatcgttgagacctcccacaacggacaccgacgtcttttggataagtaatggtatgtattacgaagaagatgatggggacggaaacggtagaataagtgtagcaaataaaatctatatgaccgataagagacgtgttattacatcccggttaaacattaatcctgtcaaggaagaagatgctacaacgtttacgtgtatggcgtttactattcctagcatcagcaaaacagttactgttagtataacgtgaatgtatgttgttacatttccatgtcaattgagtttataagaatttttatacattatcttccaacaaacaattgacgaacgtattgctatgattaactcccacgatactatgcatattattaatcattaacttgcagactatacctagtgctattttgacatactcgtgttcttgtgtaattgcggtatctatattattaaagtacgtaaatctagctatagttttattatttaattttagataatataccgtctccttatttttaaaaattgccacatcctttattaaatcatgaatgggaatttctatgtcatcgttagtatattgtgaacaacaagagcagatatctataggaaagggtggaatgcgatacattgatctatgtagttttaaaacacacgcgaactttgaagaatttatataaatcattccatcgatacatccttctatgttgacatgtatatatccaggaattcttttattaatgtcaggaaatgtataaactaaaacattgcccgaaagcggtgcctctatctgcgttatatccgttcttaacttacaaaatgtaaccaatacctttgcatgacttgttttgttcggcaacgttagtttaaacttgacgaatggattaattacaatagcatgatccgcgcatctattaagtttttttactttaacgcccttgtatgtttttacagagactttatctaaatttctagtgcttgtatgtgttataaatataacgggatatagaaccgaatcacctaccttagatacccaattacattttatcagatccagataataaacaaattttgtcgccctaactaattctatattgttatatattttacaattggttatgatatcatgtaataacttggagtctaacgcgcatcgtcgtacgtttatacaattgtgatttagtgtagtatatctacacatgtatttttccgcactatagtattctggactagtgataaaactatcgttatatctgtcttcaatgaactcatcgagatattgctctctgtcatattcatacacctgcataaactttctagacatcttacaatccgtgttattttaggatcatatttacatatttacgggtatatcaaagatgttagattagttaatgggaatcgtctataataatgaatattaaacaattatatgaggacttttaccacaaagcatcataaaaatgagtcgtcgtctgatttatgttttaaatatcaaccgcaaatcaactcataaaatacaagagaatgaaatatatacatattttagtcattgcaatatagaccatacttctacagaacttgattttgtagttaaaaactatgatctaaacagacgacaacctgtaactgggtatactgcactacactgctatttgtataataattactttacaaacgatgtactgaagatattattaaatcatgacgtaaatgtaacgatgaaaaccagtagcggacgtatgcctgtttatatattgcttactagatgttgtaatatttcacatgatgtagtgatagatatgatagacaaagataaaaaccacttattacatagagactattccaacctattactagagtatataaaatctcgttacatgttattgaaggaagaggatatcgatgagaacatagtatccactttattagataagggaatcgatcctaactttaaacaagacggatatacagcgttacattattattatttgtgtctcgcacacgtttataaactaggtgagtgtagaaaaccgataacgataaaaaaggccaagcgaattatttctttgtttatacaacatggagctaatctaaacgcgttagataattgtggtaatacaccattccatttgtatcttagtattgaaatgtgtaataatattcatatgactaaaatgctgttgacttttaatccgaatttcaaaatatgtaataatcatggattaacgcctatactatgttatataacttccgactacatacaacacgatattcttgttatgttaatacatcactatgaaacaaatgttggagaaatgccgatagatgagcgtcgtatgatcgtattcgagtttatcaaaacatattctacacgtccggcagattcgataacttatttgatgaataggtttaaaaatataaatatttatacccgctatgaaggaaagacattattacacgtagcatgtgaatataataatacacaagtaatagattatcttatacgtatcaacggagatataaatgcgttaaccgacaataacaaacacgctacacaactcattatagataacaaagaaaattccccatataccattaattgtttactgtatatacttagatatattgtagataagaatgtgataagatcgttggtggatcaacttccatctctacctatcttcgatataaaatcatttgagaaattcatatcctactgtatacttttagatgacacattttacgataggcacgttaagaatcgcgattctaaaacgtatcgatacgcattttcaaaatacatgtcgtttgataaatacgatggtataataactaaatgtcacgacgaaacaatgttactcaaactgtccactgttctagacactacactatatgcagttttaagatgtcataattcgagaaagttaagaagatacctcaacgagttaaaaaaatataataacgataagtcctttaaaatatattctaatattatgaatgagagataccttaatgtatattataaagatatgtacgtgtcaaaggtatatgataaactatttcctgttttcacagataaaaattgtctactaacattactaccttcagaaattatatacgaaatattatacatgctgacaattaacgatctttataatatatcgtatccacctaccaaagtatagttgtatttttctcatgcgatgtgtgtaaaaaaactgatattatataaatattttagtgccgtataataaagatgacgatgaaaatgatggtacatatatatttcgtatcattattgttattgctattccacagttacgccatagacatcgaaaatgaaatcacagaattcttcaataaaatgagagatactctaccagctaaagactctaaatggttgaatccagcatgtatgttcggaggcacaatgaatgatatagccgctctaggagagccattcagcgcaaagtgtcctcctattgaagacagtcttttatcgcacagatataaagactatgtggttaaatgggagaggctagaaaagaatagacggcgacaggtttctaataaacgtgttaaacatggtgatttatggatagccaactatacatctaaattcagtaaccgtaggtatttgtgcaccgtaactacaaagaatggtgactgtgttcagggtatagttagatctcatattaaaaaacctccttcatgcattccaaaaacatatgaactaggtactcatgataagtatggcatagacttatactgtggaattctttacgcaaaacattataataatataacttggtataaagataataaggaaattaatatcgacgacattaagtattcacaaacgggaaaggaattaattattcataatccagagttagaagatagcggaagatacgactgttacgttcattacgacgacgttagaatcaagaatgatatcgtagtatcaagatgtaaaatacttacggttataccgtcacaagaccacaggtttaaactaatactagatccgaaaatcaacgtaacgataggagaacctgccaatataacatgcactgctgtgtcaacgtcattattgatcgacgatgtactgattgaatgggaaaatccatccggatggcttataggattcgattttgatgtatactctgttttaactagtagaggcggtatcaccgaggcgaccttgtactttgaaaatgttactgaagaatatataggtaatacatataaatgtcgtggacacaactattattttgaaaaaacccttacaactacagtagtattggagtaaatatacaatgcatttttatatacattactgaattattattactgaattattattactgaattattattaattatatcgtatttgtgctatagaatggatgaagatacgcgactatctaggtatttgtatctcaccgatagagaacatataaatgtagactctattaaacagttgtgtaaaatatcagatcctaatgcatgttatagatgtggatgtacggctttacatgagtacttttataattatagatcagtcaacggaaaatacaagtatagatacaacggttactatcaatattattcatctagcgattatgaaaattataatgaatattattatgatagaactggtatgaacagtgagagtgataatatatcaatcaaaacagaatatgaattctatgatgaaacacaagatcaaagtacacaactagtaggttacgacattaaactcaaaaccaatgaggatgattttatggctatgatagatcagtgggtgtccatgattatatagatgaatcaattaataaagtagtatatggaagagagtctcacgtaagatggcgggatatatggcaagaacataatgatggcgtatacagtataggaaaggagtgcatagataatatatacgaagacaaccataccgtagacgaattctacaagatagacagcgtatcagatgtagatgacgcggaacacatatctccgataactaaaaaaccatagaatcagttgatgataatacctacatttctaatcttccgtataccatcaaatacaaaatattcgagcaacaataagtattttttatacctttaaaactgataaataaattttttctagtgatattttggcaagatgagaatcctatttctcatcgctttcatgtatgggtgtgttcactcatatgttaacgcggttgaaaccaaatgtccaaatctagacattgtaacatcttctggagaatttcattgttcaggatgtgtggaacatatgcctgagtttagctatatgtattggttggcaaaggatatgaaatcggacgaggataccaagtttatagaacatctgggtgatggcatcaaagaagatgaaaccgttcgtaccacagatagtggaatcgtcactctacgtaaagtccttcatgtgactgatactaataaatttgataattataggttcacttgtgtcctcgctacgctagatggcatttataaaaagaatgtttgctgaagtagttgtgtgctactatttttatttatgatataatctaatggaattaatttgaattgatatttatccaatactaaagattatattagaatcaaattaatcttttatacgagaaaaaataacgacatacgtcgtcaacaaattaaactttttatttattagttaactagcttatagaacttgctcattgttatgtttctaaaacgggtacggcatataggacaattatccgacgcaccggtttctcttcgtgttctatgccatatattgatgcatgttatgcaaaatatatgagtacacgaatccaataaaccaaagtatctatcgttttgagtaaacaacttcatagcaaattccacattctttttctttacttactctatacacgtcctcgtatttatttagtattttgatgatatccaactcagaaatggttgttgtattattgggtgtatttggagtataggtattattagctatgtaccaatttaccaaccctcttaatattgattgataatcacatcggttatccaattaataactaaattgtagtgtatatatagaccatatatgtttctatttttttgacagttacgtatagtttcagtaagttttgattgttgtattcctgtatctctagataagttagtcatatagtcccttccggcgatacgttttttccaagcccgaaattgattagccaaatgtgtatttatttttgtgatattgatataatatttcggataatgcatactgttagtcttatatcatttggttcatctatgtattgtaatattgttacatgatctatagatgatgtattgattttggcaggatcgaattccatatccgcgactaaacagtgaaaaaaatgtaaatactttttaaattttaaattagtaaaacttttttttattttttatgattccaaaaatactgaatacaaagtcctaaattataaatatggagatcatactaccacaacttattattatgtatacaaggccggtgtaatagatagatatatataattctattacaccggcagacaattaccgaccggtatttgtcgttaccaacataccgtataatatgtaatatacaattccataacccattgacagttgttatacatcaaaattgcaattcttttgattacgatgttataagaatgtagttaattgatgtatgatgttaatgtgtcctctttcctcttataacatcgtaatcaaaaacttttttataatatatacctaataatgtgtcttaatagttctcgtgattcgtcaaacaatcattcttataaaatataataaagcaacgtaaaaacacataaaaataagcgtaactaataagacaatggatatttacgacgataaaggtctacagactattaaactgtttaataatgaatttgattgtataaggaatgacatcagagaattatttaaacatgtaactgattccgatagtatacaacttccgatggaagacaattctgatattatagaaaatatcagaaaaatactatatagacgattaaaaaatgtagaatgtgttgacatcgataacacaataacttttatgaaatacgatccaaatgatgataataagcgtacgtgttctaattgggtacccttaactaataactatatggaatattgtctagtaatatatttggaaacaccgatatgtggaggcaaaataaaattataccaccctacaggaaatataaagtcggataaggatattatgtttgcaaagactctagactttaaatcaacgaaagtgttaactggacgtaaaacaattgccgttctagacatatccgtttcatataatagatcaatgactactattcactacaacgacgacgttgatatagatatacatactgataaaaatggaaaagagttatgttattgttatataacaatagatgatcattacttggttgatgtggaaactataggagttatagtcaatagatctggaaaatgtctgttagtaaataaccatctaggtataggtatcgttaaagataaacgtataagcgatagttttggagatgtatgtatggatacaatatttgacttttctgaagcacgagagttattttcattaactaatgatgataacaggaatatagcatgggacactgataaactagacgatgatacagatatatggactcccgtcacagaagatgattacaaatttctttctagactagtattgtatgcaaaatctcaatcggatactgtatttgactattatgttcttactggtgatacggaaccacccactgtattcattttcaaggtaactagattttactttaatatgccgaaataaaaaatttttgtataatatctagaggtagaggtattgtttagataaatacaaataacatagatacatcgcatacttagcatttttataaatatacataagacatacactttatacatttttgtaaaaatactcataaaaaaatttataaaaattatggcacaaccatatcttgtataggtagtttagttcgtcgagtgaacctataaacagataatagacaacacataataatgcctactaatacaagcataataccgggagatgggatatatgacgttgtagtgtttgggttttctgaacgttgatagtctactaatactacatgctgacatctaatgcctgtataaccatgagagcatctacaatacataccgtcaatatctctagcgtggatacagtcaccgtgtaaacaatatccatctccctctggaccgcataatctgatagctggaatatctgttgtagcgtttgtaatttctggcaatgtcgtttcgatagcgttaccactatcggcgaatgatctgattatcatagcagcgaacaacaacatcagataatttatcaacatttttgatggattctgtgtttatgctgtttctcagtgtgtgtttatgacaagattgggaattttatattattaattcagtaatataaactaataatatattgttaattgtgtaaataatataaaaataacaatacaatattgaatgtgttgctgttaaaaatgtatgtgttaatataatagaataaaataaatgagtatgatcattttagataacgattgattttatcattaccgcttcattcttatattctttgcttacggaacctatatttagaaacatctactaacaattttttatgcttgcattattaatggtatgtaatatgattgattgtgtacgcaataccaatttgttaagtatgaatacggggtacaaacataaattgaaatttaacattatttatttatgatatatatcgttatcgttaggtctataccatggatatctttaaagaactaatcttaaaacaccctgatgaaaatgttttgatttctccagtttccattttatctactttatctattctaaatcatggagcagctggttctacagctgaacaactatcaaaatatatagagaatatgaatgagaatacacccgatgacaataatgatgacatggaggtagatattccgtattgtgcgacactagctaccgcaaataaaatatacggtagcgatagtatcgagttccacgcctccttcctacaaaaaataaaagacgattttcaaactgtaaactttaataatgctaaccaaacaaaggaactaatcaacgaatgggttaagacaatgacaaatggtaaaattaattccttattgactagtccgctatccattaatactcgtatgacagttgttagcgccgtccattttaaagcaatgtggaaatatccattttctaaacatcttacatatacagacaagttttatatttctaagaatatagttaccagcgttgatatgatggtgggtaccgagaataacttgcaatatgtacatattaatgaattattcggaggattctctattatcgatattccatacgagggaaactctagtatggtaattatactaccggacgacatagaaggtatatataacatagaaaaaaatataacagatgaaaaatttaaaaaatggtgtggtatgttatctactaaaagtatagacttgtatatgccaaagtttaaagtggaaatgacagaaccgtataatctggtaccgattttagaaaatttaggacttactaatatattcggatattatgcagattttagcaagatgtgtaatgaaactatcactgtagaaaaatttctacatacgacgtttatagatgttaatgaggagtatacagaagcatcggccgttacaggagtatttacgattaacttttcgatggtatatcgtacgaaggtctacataaaccatccattcatgtacatgattaaagacaccacaggacgtatactttttatagggaaatactgctatccgcaataaatataaacaaatagacttttataaagagtcttcaacgataagtatatcgacatactacttatgctgcgaaagattctgaacgagaacgactatctcaccctcttggatcatatccgcactgctaaatactaaatctccactacactttttatcatcttatgaggaatgattgccttcgtgaaataggaataattagcaccagaatagctatggattattgtggtagagagtgcactattctatgtcgtctactggatgaagatgtgacgtacaaaaaaataaaactagaaattgaaacgtgtcacaacttatcaaaacatatagatagacgaggaaacaatgcgctacattgttacgtctccaataaatgcgatacagacattaagattgttctctcgcggagtcgagagactttgtagaaacaacgaaggattaactccgctaggagtatacagtaagcatagatacgtaaaatctcagattgtgcatctactgatatccagctattcaaattcctctaacgaactcaagtcgaatataaatgatttcgatctgtattcggataatatcgacttacgtctgctaaaatacctaattgtggataaacggatacgtccgtccaagaatacgaattatgcaatcaatggtctcggattggtggatatatacgtaacgacgcctaatccgagaccagaagtattgctatggcttcttaaatcagaatgttacagcaccggttacgtatttcgtacctgtatgtacgacagtgatatgtgtaagaactctcttcattactatatatcgtctcatagagaatctcaatctctatccaaggatgtaattaaatgtttgatcgataacaatgtttccatccatggcagagacgaaggaggatctttacccatccaatactactggtctttctcaaccatagatatagagattgttaaattattattaataaaggatgtggacacgtgtagagtatacgacgtcagccctatattagaggcgtattatctaaacaagcgatttagagtaaccccatataatgtagacatggaaatcgttaatcttcttattgagagacgtcatactcttgtcgacgtaatgcgtagtattacttcgtacgattccagagaatataaccactacatcatcgataacattctaaagagatttagacaacaggatgaatccatcgtacaagccatactgataaactacttacattacggcgatatggtcgttcgatgcatgttagataacggacaacaactatcctctacacgactactttgttaataataatctcgtcgatgtaaacgtcgtaaggtttatcgtggaaaatatggacacgcggctgtaaatcacgtatcgaacaatggccgtctatgtatgtacggtctgatattatcgagatttaataattgcgggtatcactgttatgaaaccatactgatagatgtatttgatatactaagcaagtacatggatgatatagatatgatcgataactctactatattacgcggtcgatgtcaataatatacaatttgcaaagcggttattggaatatggagcgagtatcacgctcgataatcaatacggccatccagaaaagcagttacagaagagaaaacaaaacgaaatcgttgttctacaagatgtctctccctacgacgattactacgtaaaaaagatactagcctactgcctattaagggacgagtcattcgcggaactacatagtaaattctgtttaaacgaggactataaaagtgtatttatgaaaaatatatcattcgataagatagattccatcatcgtgacataagtcgcctcaaagagattcgaatctccgacaccgacctgtatacggtatcacagctatcttaaagccatacattcagacagtcacatttcatttcccatgtacgacgatctcatagaacagtgccatctatcgatggagcgtaaaagtaaactcgtcgacaaagcactcaataaattagagtctaccatcggtcaatctagactatcgtatttgcctccggaaattatgcgcaatatcatctaaacagtatgttgtacggaaagaaccattacaaatattatccatgatagaaagaaaatatctatatgattggagaagtaggaaacaggaacaagacaacgattactacattattaaatcatgaagtccgtattatactcgtatatattgtttctctcatgtataataataaacggaagagatatagcaccgcatgcaccatccgatggaaagtgtaaagacaacgaatacaaacgccataatttgtgtccgggaacatacgcttccagattatgcgatagcaagactaacacacgatgtacgccgtgtggttcgggtaccttcacatctcgcaataatcatttacccgcttgtctaagttgtaacggaagacgcgatcgtgtaacacgactcacaatagaatctgtgaatgctctcccggatattattgtcttctcaaaggatcatccggatgcaaggcatgtgtttcccaaacaaaatgtggaataggatacggagtatccggagacgtcatctgttctccgtgtggtctcggaacatattctcacaccgtctcttccgcagataaatgcgaacccgtacccagaaatacgtttaactatatcgatgtggaaattaacctgtatccagttaacgacacgtcgtgtactcggacgaccactaccggtctcagcgaatccatctcaacgtcggaactaactattactatgaatcataaagactgtaatcccgtatttcgtgatggatacttctccgttcttaataaggtagcgacttcaggtttctttacaggagaaaggtgtgcactctgaatttcgagattaaatgcaataacaaagattcttcctccaaacagttaacgaaagcaaagaatgatactatcatgccgcattcggagacagtaactctagtgggcgacatctatatactatatagtaataccaatactcaagactacgaaactgatacaatctcttatcatgtgggtaatgttctcgatgtcgatagccatatgcccggtagttgcgatatacataaactgatcactaattccaaacccacccactttttatagtaagtttttcacccataaataataaatacaataattaatttctcgtaaaagtagaaaatatattctaatttattgcacggtaaggaagtagaatcataaagaacagtactcaatcaatagcaattatgaaacaatatatcgtcctggcatgcatgtgcctggcggcagctgctatgcctgccagtcttcagcaatcatcctcatcctcctcctcgtgtacggaagaagaaaacaaacatcatatgggaatcgatgttattatcaaagtcacaaagcaagaccaaacaccgaccaatgataagatttgccaatccgtaacggaaattacagagtccgagtcagatccagatcccgaggtggaatcagaagatgattccacatcagtcgaggatgtagatcctcctaccacttattactccatcatcggtggaggtctgagaatgaactttggattcaccaaatgtcctcagattaaatccatctcagaatccgctgatggaaacacagtgaatgctagattgtccagcgtgtccccaggacaaggtaaggactctcccgcgatcactcatgaagaagctcttgctatgatcaaagactgtgaagtgtctatcgacatcagatgtagcgaagaagagaaagacagcgacatcaagacccatccagtactcgggtctaacatctctcataagaaagtgagttacgaagatatcatcggttcaacgatcgtcgatacaaaatgcgtcaagaatctagagtttagcgttcgtatcggagacatgtgcaaggaatcatctgaacttgaggtcaaggatggattcaagtatgtcgacggatcggcatctgaaggtgcaaccgatgatacttcactcatcgattcaacaaaactcaaagcgtgtgtctgaatcgataactctattcatctgaaattggatgagtagggttaatcgaacgattcaggcacaccacgaattaaaaaagtgtaccggacactatattccggtttgcaaaacaaaaatgttcttaactacattcacaaaaagttacctctcgcgacttcttctttttctgtctcaatagtgtgatacgattatgacactattcctattcctattcctatttcctttcagagtatcacaaaaatattaaacctctttctgatggtctcataaaaaaagttttacaaaaatatttttattctctttctctctttgatggtctcataaaaaaagttttacaaaaatatttttattctctttctctctttgatggtctcataaaaaaagttttacaaaaatatttttattctctttctctctttgatggtctcataaaaaaagttttacaaaaatatttttattctctttctctctttgatggtctcataaaaaaagttttacaaaaatatttttattctctttctctctttgatggtctcataaaaaaagttttacaaaaatatttttattctctttctctctttgatggtctcataaaaaaagttttacaaaaatatttttattctctttctctctttgatggtctcataaaaaaagttttacaaaaatatttttattctctttctctctttgatggtctcataaaaaaagttttacaaaaatatttttattctctttctctctttgatggtctcataaaaaaagttttacaaaaatatttttattctctttctctctttgatggtctcataaaaaaagttttacaaaaatatttttattctctttctctctttgatggtctcataaaaaaagttttacaaaaatatttttattctctttctctctttgatggtctcataaaaaagttttacaaaaatatttttattctctttctctctttgatggtctcataaaaaagttttacaaaaatatttttattctctttctctctttgatggtctcataaaaaaagttttacaaaaatatttttattctctttctctctttgatggtctcataa

SEQ ID NO: 14 - DNA, 199504 bp, Artificial Sequence
  GLV-1h253
ttatgagaccatcaaagagagaaagagaataaaaatatttttgtaaaactttttttatgagaccatcaaagagagaaagagaataaaaatatttttgtaaaacttttttatgagaccatcaaagagagaaagagaataaaaatatttttgtaaaacttttttatgagaccatcaaagagagaaagagaataaaaatatttttgtaaaactttttttatgagaccatcaaagagagaaagagaataaaaatatttttgtaaaactttttttatgagaccatcaaagagagaaagagaataaaaatatttttgtaaaactttttttatgagaccatcaaagagagaaagagaataaaaatatttttgtaaaactttttttatgagaccatcaaagagagaaagagaataaaaatatttttgtaaaactttttttatgagaccatcaaagagagaaagagaataaaaatatttttgtaaaactttttttatgagaccatcaaagagagaaagagaataaaaatatttttgtaaaactttttttatgagaccatcaaagagagaaagagaataaaaatatttttgtaaaactttttttatgagaccatcaaagagagaaagagaataaaaatatttttgtaaaactttttttatgagaccatcaaagagagaaagagaataaaaatatttttgtaaaactttttttatgagaccatcaaagagagaaagagaataaaaatatttttgtaaaactttttttatgagaccatcaaagagagaaagagaataaaaatatttttgtaaaactttttttatgagaccatcagaaagaggtttaatatttttgtgatactctgaaaggaaataggaataggaataggaatagtgtcataatcgtatcacactattgagacagaaaaagaagaagtcgcgagaggtaactttttgtgaatgtagttaagaacatttttgttttgcaaaccggaatatagtgtccggtacacttttttaattcgtggtgtgcctgaatcgttcgattaaccctactcatccaatttcagatgaatagagttatcgattcagacacacgctttgagttttgttgaatcgatgagtgaagtatcatcggttgcaccttcagatgccgatccgtcgacatacttgaatccatccttgacctcaagttcagatgattccttgcacatgtctccgatacgaacgctaaactctagattcttgacgcattttgtatcgacgatcgttgaaccgatgatatcttcgtaactcactttcttatgagagatgttagacccgagtactggatgggtcttgatgtcgctgtctttctcttcttcgctacatctgatgtcgatagacacttcacagtctttgatcatagcaagagcttcttcatgagtgatcgcgggagagtccttaccttgtcctggggacacgctggacaatctagcattcactgtgtttccatcagcggattctgagatggatttaatctgaggacatttggtgaatccaaagttcattctcagacctccaccgatgatggagtaataagtggtaggaggatctacatcctcgactgatgtggaatcatcttctgattccacctcgggatctggatctgactcggactctgtaatttccgttacggattggcaaatcttatcattggtcggtgtttggtcttgctttgtgactttgataataacatcgattcccatatgatgtttgttttcttcttccgtacacgaggaggaggatgaggatgattgctgaagactggcaggcatagcagctgccgccaggcacatgcatgccaggacgatatattgtttcataattgctattgattgagtactgttctttatgattctacttccttaccgtgcaataaattagaatatattttctacttttacgagaaattaattattgtatttattatttatgggtgaaaaacttactataaaaagtgggtgggtttggaattagtgatcagtttatgtatatcgcaactaccgggcatatggctatcgacatcgagaacattacccacatgataagagattgtatcagtttcgtagtcttgagtattggtattactatatagtatatagatgtcgcccactagagttactgtctccgaatgcggcatgatagtatcattctttgctttcgttaactgtttggaggaagaatctttgttattgcatttaatctcgaaattcagagtgcacacctttctcctgtaaagaaacctgaagtcgctaccttattaagaacggagaagtatccatcacgaaatacgggattacagtctttatgattcatagtaatagttagttccgacgttgagatggattcgctgagaccggtagtggtcgtccgagtacacgacgtgtcgttaactggatacaggttaatttccacatcgatatagttaaacgtatttctgggtacgggttcgcatttatctgcggaagagacggtgtgagaatatgttccgagaccacacggagaacagatgacgtctccggatactccgtatcctattccacattttgtttgggaaacacatgccttgcatccggatgatcctttgagaagacaataatatccgggagagcattcacagattctattgtgagtcgtgttacacgatcgcgtcttccgttacaacttagacaagcgggtaaatgattattgcgagatgtgaaggtacccgaaccacacggcgtacatcgtgtgttagtcttgctatcgcataatctggaagcgtatgttcccggacacaaattatggcgtttgtattcgttgtctttacactttccatcggatggtgcatgcggtgctatatctcttccgtttattattatacatgagagaaacaatatatacgagtataatacggacttcatgatttaataatgtagtaatcgttgtcttgttcctgtttcctacttctccaatcatatagatattttctttctatcatggataatatttgtaatggttctttccgtacaacatactgtttagatgatattgcgcataatttccggaggcaaatacgatagtctagattgaccgatggtagactctaatttattgagtgctttgtcgacgagtttacttttacgctccatcgatagatggcactgttctatgagatcgtcgtacatgggaaatgaaatgtgactgtctgaatgtatggctttaagatagctgtgataccgtatacaggtcggtgtcggagattcgaatctctttgaggcgacttatgtcacgatgatggaatctatcttatcgaatgatatatttttcataaatacacttttatagtcctcgtttaaacagaatttactatgtagttccgcgaatgactcgtcccttaataggcagtaggctagtatcttttttacgtagtaatcgtcgtagggagagacatcttgtagaacaacgatttcgttttgttttctcttctgtaactgcttttctggatggccgtattgattatcgagcgtgatactcgctccatattccaataaccgctttgcaaattgtatattattgacatcgaccgcgtaatatagtagagttatcgatcatatctatatcatccatgtacttgcttagtatatcaaatacatctatcagtatggtttcataacagtgatacccgcaattattaaatctcgataatatcagaccgtacatacatagacggccattgttcgatacgtgatttacagccgcgtgtccatattttccacgataaaccttacgacgtttacatcgacgagattattattaacaaagtagtcgtgtagaggatagttgttgtccgttatctaacatgcatcgaacgaccatatcgccgtaatgtaagtagtttatcagtatggcttgtacgatggattcatcctgttgtctaaatctctttagaatgttatcgatgatgtagtggttatattctctggaatcgtacgaagtaatactacgcattacgtcgacaagagtatgacgtctctcaataagaagattaacgatttccatgtctacattatatggggttactctaaatcgcttgtttagataatacgcctctaatatagggctgacgtcgtatactctacacgtgtccacatcctttattaataataatttaacaatctctatatctatggttgagaaagaccagtagtattggatgggtaaagatcctccttcgtctctgccatggatggaaacattgttatcgatcaaacatttaattacatccttggatagagattgagattctctatgagacgatatatagtaatgaagagagttcttacacatatcactgtcgtacatacaggtacgaaatacgtaaccggtgctgtaacattctgatttaagaagccatagcaatacttctggtctcggattaggcgtcgttacgtatatatccaccaatccgagaccattgattgcataattcgtattcttggacggacgtatccgtttatccacaattaggtattttagcagacgtaagtcgatattatccgaatacagatcgaaatcatttatattcgacttgagttcgttagaggaatttgaatagctggatatcagtagatgcacaatctgagattttacgtatctatgcttactgtatactcctagcggagttaatccttcgttgtttctacaaagtctctcgactccgcgagagaacaatcttaatgtctgtatcgcatttattggagacgtaacaatgtagcgcattgtttcctcgtctatctatatgttttgataagttgtgacacgtttcaatttctagttttatttttttgtacgtcacatcttcatccagtagacgacatagaatagtgcactctctaccacaataatccatagctattctggtgctaattattcctatttcacgaaggcaatcattcctcataagatgataaaaagtgtagtggagatttagtatttagcagtgcggatatgatccaagagggtgagatagtcgttctcgttcagaatctttcgcagcataagtagtatgtcgatatacttatcgttgaagactctttataaaagtctatttgtttatatttattgcggatagcagtatttccctataaaaagtatacgtcctgtggtgtctttaatcatgtacatgaatggatggtttatgtagaccttcgtacgatataccatcgaaaagttaatcgtaaatactcctgtaacggccgatgcttctgtatactcctcattaacatctataaacgtcgtatgtagaaatttttctacagtgatagtttcattacacatcttgctaaaatctgcataatatccgaatatattagtaagtcctaaattttctaaaatcggtaccagattatacggttctgtcatttccactttaaactttggcatatacaagtctatacttttagtagataacataccacaccattttttaaatttttcatctgttatatttttttctatgttatatataccttctatgtcgtccggtagtataattaccatactagagtttccctcgtatggaatatcgataatagagaatcctccgaataattcattaatatgtacatattgcaagttattctcggtacccaccatcatatcaacgctggtaactatattcttagaaatataaaacttgtctgtatatgtaagatgtttagaaaatggatatttccacattgctttaaaatggacggcgctaacaactgtcatacgagtattaatggatagcggactagtcaataaggaattaattttaccatttgtcattgtcttaacccattcgttgattagttcctttgtttggttagcattattaaagtttacagtttgaaaatcgtcttttattttttgtaggaaggaggcgtggaactcgatactatcgctaccgtatattttatttgcggtagctagtgtcgcacaatacggaatatctacctccatgtcatcattattgtcatcgggtgtattctcattcatattctctatatattttgatagttgttcagctgtagaaccagctgctccatgatttagaatagataaagtagataaaatggaaactggagaaatcaaaacattttcatcagggtgttttaagattagttctttaaagatatccatggtatagacctaacgataacgatatatatcataaataaataatgttaaatttcaatttatgtttgtaccccgtattcatacttaacaaattggtattgcgtacacaatcaatcatattacataccattaataatgcaagcataaaaaattgttagtagatgtttctaaatataggttccgtaagcaaagaatataagaatgaagcggtaatgataaaatcaatcgttatctaaaatgatcatactcatttattttattctattatattaacacatacatttttaacagcaacacattcaatattgtattgttatttttatattatttacacaattaacaatatattattagtttatattactgaattaataatataaaattcccaatcttgtcataaacacacactgagaaacagcataaacacagaatccatcaaaaatgttgataaattatctgatgttgttgttcgctgctatgataatcagatcattcgccgatagtggtaacgctatcgaaacgacattgccagaaattacaaacgctacaacagatattccagctatcagattatgcggtccagagggagatggatattgtttacacggtgactgtatccacgctagagatattgacggtatgtattgtagatgctctcatggttatacaggcattagatgtcagcatgtagtattagtagactatcaacgttcagaaaacccaaacactacaacgtcatatatcccatctcccggtattatgcttgtattagtaggcattattatgtgttgtctattatctgtttataggttcactcgacgaactaaactacctatacaagatatggttgtgccataatttttataaatttttttatgagtatttttacaaaaatgtataaagtgtatgtcttatgtatatttataaaaatgctaagtatgcgatgtatctatgttatttgtatttatctaaacaatacctctacctctagatattatacaaaaattttttatttcggcatattaaagtaaaatctagttaccttgaaaatgaatacagtgggtggttccgtatcaccagtaagaacataatagtcaaatacagtatccgattgagattttgcatacaatactagtctagaaagaaatttgtaatcatcttctgtgacgggagtccatatatctgtatcatcgtctagtttatcagtgtcccatgctatattcctgttatcatcattagttaatgaaaataactctcgtgcttcagaaaagtcaaatattgtatccatacatacatctccaaaactatcgcttatacgtttatctttaacgatacctatacctagatggttatttactaacagacattttccagatctattgactataactcctatagtttccacatcaaccaagtaatgatcatctattgttatataacaataacataactcttttccatttttatcagtatgtatatctatatcaacgtcgtcgttgtagtgaatagtagtcattgatctattatatgaaacggatatgtctagaacggcaattgttttacgtccagttaacactttcgttgatttaaagtctagagtctttgcaaacataatatccttatccgactttatatttcctgtagggtggtataattttattttgcctccacatatcggtgtttccaaatatattactagacaatattccatatagttattagttaagggtacccaattagaacacgtacgcttattatcatcatttggatcgtatttcataaaagttattgtgttatcgatgtcaacacattctacattttttaatcgtctatatagtatttttctgatattttctataatatcagaattgtcttccatcggaagttgtatactatcggaatcagttacatgtttaaataattctctgatgtcattccttatacaatcaaattcattattaaacagtttaatagtctgtagacctttatcgtcgtaaatatccattgtcttattagttacgcttatttttatgtgtttttacgttgctttattatattttataagaatgattgtttgacgaatcacgagaactattaagacacattattaggtatatattataaaaaagtttttgattacgatgttataagaggaaagaggacacattaacatcatacatcaattaactacattcttataacatcgtaatcaaaagaattgcaattttgatgtataacaactgtcaatgggttatggaattgtatattacatattatacggtatgttggtaacgacaaataccggtcggtaattgtctgccggtgtaatagaattatatatatctatctattacaccggccttgtatacataataataagttgtggtagtatgatctccatatttataatttaggactttgtattcagtatttttggaatcataaaaaataaaaaaaagttttactaatttaaaatttaaaaagtatttacatttttttcactgtttagtcgcggatatggaattcgatcctgccaaaatcaatacatcatctatagatcatgtaacaatattacaatacatagatgaaccaaatgatataagactaacagtatgcattatccgaaatattatatcaatatcacaaaaataaatacacatttggctaatcaatttcgggcttggaaaaaacgtatcgccggaagggactatatgactaacttatctagagatacaggaatacaacaatcaaaacttactgaaactatacgtaactgtcaaaaaaatagaaacatatatggtctatatatacactacaatttagttattaattggataaccgatgtgattatcaatcaatattaagagggttggtaaattggtacatagctaataatacctatactccaaatacacccaataatacaacaaccatttctgagttggatatcatcaaaatactaaataaatacgaggacgtgtatagagtaagtaaagaaaaagaatgtggaatttgctatgaagttgtttactcaaaacgatagatactttggtttattggattcgtgtactcatatattttgcataacatgcatcaatatatggcatagaacacgaagagaaaccggtgcgtcggataattgtcctatatgccgtacccgttttagaaacataacaatgagcaagttctataagctagttaactaataaataaaaagtttaatttgttgacgacgtatgtcgttattttttctcgtataaaagattaatttgattctaatataatctttagtattggataaatatcaattcaaattaattccattagattatatcataaataaaaatagtagcacacaactacttcagcaaacattctttttataaatgccatctagcgtagcgaggacacaagtgaacctataattatcaaatttattagtatcagtcacatgaaggactttacgtagagtgacgattccactatctgtggtacgaacggtttcatcttctttgatgccatcacccagatgttctataaacttggtatcctcgtccgatttcatatcctttgccaaccaatacatatagctaaactcaggcatatgttccacacatcctgaacaatgaaattctccagaagatgttacaatgtctagatttggacatttggtttcaaccgcgttaacatatgagtgaacacacccatacatgaaagcgatgagaaataggattctcatcttgccaaaatatcactagaaaaaatttatttatcagttttaaaggtataaaaaatacttattgttgctcgaatattttgtatttgatggtatacggaagattagaaatgtaggtattatcatcaactgattctatggttttatgtattctatcatgtttcactattgcgttggaaataatatcatatgcttccacatatattttattttgttttaactcataatactcacgtaattctggattattggcatatctatgaataattttagctccatgatcagtaaatattaatgagaacatagtattaccacctaccattatttttttcatctcattcaattcttaattgcaaagatctatataatcattatagcgttgacttatggactctggaatcttagacgatgtacagtcatctataatcatggcatatttaatacattgttttatagcatagtcgttatctacgatgttagatatttctctcaatgaatcaatcacacaatctaatgtaggtttatgacataatagcattttcagcagttcaatgtttttagattcgttgatggcaatggctatacatgtatatccgttatttgatctaatgttgacatctgaaccggattctagcagtaaagatactagagattgtttattatatctaacagccttgtgaagaagtgtttctcctcgtttgtcaatcatgttaatgtctttaagataaggtaggcaaatgtttatagtactaagaattgggcaagcataagacatgtcacaaagacccttttttgtatgtataagtgtaaaaattataacatccatagttggatttacataggtgtccaatcgggatctctccatcatcgagataattgatggcatctcccttccttttttagtagatatttcatcgtgtaagaatcaatattaatatttctaaagtatccgtgtatagcctctttatttaccacagctccatattccactagagggatatcgccgaatgtcatatactcaattagtatatgttggaggacatccgagttcattgttttcaatatcaaagagatggtttccttatcatttctccatagtggtacaatactacacattattccgtgcggctttccattttccaaaaacaatttgaccaaatctaaatctacatctttattgtatctataatcactatttagataatcagccataattcctcgagtgcaacatgttagatcgtctatatatgaataagcagtgttatctattcctttcattaacaatttaacgatgtctatatctatatgagatgacttaatataatattgaagagctgtacaatagtttttatctataaaagacggcttgattccgtgattaattagacatttaacaacttccggacgcacatatgctctcgtatccgactctgaatacagatgagagatgatatacagatgcaatacggtaccgcaatttcgtagttgataatcatcatacgcgtatcagtactcgtcctcataaagaacactgcagccattttctatgaacaaatcaataattttagaaacaggatcattgtcattacataattttctataactgaacgatggttttcacatttaacactcaagtcaaatccatgttctaccaacacctttatcaagtcaacgtctacatttttggatttcatatagctgaatatattaaagttatttatgttgctaaatccagtggcttctagtagagccatcgctatatccttattaactttaacatgtctactatttgtgtattcttctaatggggtaagctgtctccaatttttgcgtaatggattagtgccactgtctagtagtagtttgacgacctcgacattattacaatgctcattaaaaaggtatgcgtgtaaagcattattcttgaattggttcctggtatcattaggatctctgtctttcaacatctgtttaagttcatcaagagccacctcctcattttccaaatagtcaaacattttgactgaatgagctactgtgaactctatacacccacacaactaatgtcattaaatatcatgtcaaaaacttgtacaattattaataaaaataatttagtgtttaaattttaccagttccagattttacacctccgttaatacctccattaaccccactggacgatcctcctccccacattccaccgccaccagatgtataagttttagatcctttattactaccatcatgtccatggataaagacactccacatgccgccactaccccctttagaagacatattaataagacttaaggacaagtttaacaataaaattaatcacgagtaccctactaccaacctacactattatatgattatagtttctatttttacagtaccttgactaaagtttctagtcacaagagcaatactaccaacctacactattatatgattatagtttctatttttataggaacgcgtacgagaaaatcaaatgtctaatttctaacggtagtgttgataaacgattgttatccgcggatacctcctctatcatgtcgtctattttcttactttgttctattaacttattagcattatatattatttgattataaaacttatattgcttattagcccaatctgtaaatatcggattattaacatatcgtttctttgtaggtttatttaacatgtacatcactgtaagcatgtccttaccatttattttaatttgacgcatatccgcaatttctttttcgcagtcggttataaattctatatatgatggatacatgctacatgtgtacttataatcgactaatatgaagtacttgatacatattttcagtaacgatttattattaccacctatgaataagtacctgtgatcgtctaggtaatcaactgttttcttaatacattcgatggttggtaatttactcagaataatttccaatatcttaatatataattctgctatttctgggatatatttatctgccagtataacacaaatagtaatacatgtaaacccatattttgttattatattaatgtctgcgccattatctattaaccattctactaggctgacactatgcgactcaatacaatgataaagtatactacatccatgtttatctattttgtttatatcatcaatatacggcttacaaagttttagtatcgataacacatccaactcacgcatagagaaggtagggaataatggcataatatttattaggttatcatcattgtcattatctacaactaagtttccattttttaaaatatactcgacaactttaggatctctattgccaaatttttgaaaatatttatttatatgcttaaatctatataatgtagctccttcatcaatcatacatttaataacattgatgtatactgtatgataagatacatattctaacaatagatcttgtatagaatctgtatatcttttaagaattgtggatattaggatattattacataaactattacacaattctaaaatataaaacgtatcacggtcgaataatagttgatcaactatataattatcgattttgtgatttttcttcctaaactgtttacgtaaatagttagatagaatattcattagttcatgaccactatagttactatcgaataacgcgtcaaatatttcccgtttaatatcgcatttgtcaagataataatagagtgtggtatgttcacgataagtataataacgcatctctttttcgtgtgaaattaaatagtttattacgtccaaagatgtagcataaccatcttgtgacctagtaataatataataatagagaactgttttacccattctatcatcataatcagtggtgtagtcgtaatcgtaatcgtctaattcatcatcccaattataatattcaccagcacgtctaatctgttctattttgatcttgtatccatactgtatgttgctacatgtaggtattcctttatccaataatagtttaaacacatctacattgggatttgatgttgtagcgtatttttctacaatattaataccatttttgatactatttatttctatacctttcgaaattagtaatttcaataagtctatattgatgttatcagaacatagatattcgaatatatcaaaatcattgatatttttatagtcgactgacgacaataacaaaatcacaacatcgtttttgatattattatttttcttggtaacgtatgcctttaatggagtttcaccatcatactcatataatggatttgcaccactttctatcaatgattgtgcactgctggcatcgatgttaaatgttttacaactatcatagagtatcttatcgttaaccatgattggttgttgatgctatcgcattttttggtttctttcatttcagttatgtatggatttagcacgtttgggaagcatgagctcatatgatttcagtactgtagtgtcagtactattagtttcaataagatcaatctctagatctatagaatcaaaacacgataggtcagaagataatgaatatctgtaggcttcttgttgtactgtaacttctggttttgttagatggttgcatcgtgctttaacgtcaatggtacaaattttatcctcgctttgtgtatcatattcgtccctactataaaattgtatattcagattatcatgcgatgtgtatacgctaacggtatcaataaacggagcacaccatttagtcataaccgtaatccaaaaatttttaaagtatatcttaacgaaagaagttgtgtcattgtctacggtgtatggtactagatcctcataagtgtatatatctagagtaatgtttaatttattaaatggttgataatatggatcctcgtgacaatttccgaagatggaaataagacataaacacgcaataaatctaattgcggacatggttactccttaaaaaaatacgaataatcaccttggctatttagtaagtgtcatttaacactatactcatattaatccatggactcataatctctatacgggattaacggatgttctatatacggggatgagtagttctcttctttaactttatactttttactaatcatatttagactgatgtatgggtaatagtgtttgaagagctcgttctcatcatcagaataaatcaatatctctgtttttttgttatacagatgtattacagcctcatatattacgtaatagaacgtgtcatctaccttattaactttcaccgcatagttgtttgcaaatacggttaatcctttgacctcgtcgatttccgaccaatctgggcgtataatgaatctaaactttaattgcttgtaatcattcgaaataatttttagtttgcatccgtagttatcccctttatgtaactgtaaatttctcaacgcgatatctccattaataatgatgtcgaattcgtgctgtatacccatactgaatggatgaacgaataccgacggcgttaatagtaatttactttttcatctttacatattgggtactagttttactatcataagtttataaattccacaagctactatggaataagccaaccatcttagtataccacacatgtcttaaagtttattaattaattacatgttgttttatatatatcgctacgaatttaaagagaaattagtttaggaagaaaaattatctatctacatcatcacgtctctgtattctacgatagagtgctactttaagatgcgacagatccgtgtcatcaaatatatactccattaaaatgattattccggcagcgaacttgatattggatatatcacaacctttgttaatatctacgacaatagacagcagtcccatggttccataaacagtgagtttatctttctttgaagagatattttgtagagatcttataaaactgtcgaatgacatcgcatttatatctttagctaaatcgtatatgttaccatcgtaatatctaaccgcgtctatcttaaacgtttccatcgctttaaagacgtttccgatagatggtctcatttcatcagtcatactgagccaacaaatataatcgtgtataacatctttgatagaatcagactctaaagaaaacgaatcggctttattatacgcattcatgataaacttaatgaaaaatgtttttcgttgtttaagttggatgaatagtatgtcttaataattgttattatttcattaattaatatttagtaacgagtacactctataaaaacgagaatgacataactaatcataactagttatcaaagtgtctaggacgcgtaattttcatatggtatagatcctgtaagcattgtctgtattctggagctattttctctatcgcattagtgagttcagaatatgttataaatttaaatcgaataacgaacataactttagtaaagtcgtctatattaactcttttattttctagccatcgtaataccatgtttaagatagtatattctctagttactacgatctcatcgttgtctagaatatcacatactgaatctacatccaattttagaaattggtctgtgttacatatctcttctatattattgttgatgtattgtcgtagaaaactattacgtagaccattttctttataaaacgaatatatagtactccaattatctttaccgatatatttgcacacataatccattctctcaatcactacatctttaagattttcgttgttaagatatttggctaaactatataattctattagatcatcaacagaatcagtatatatttttctagatccaaagacgaactctttggcgtcctctataatattcccagaaaagatattttcgtgttttagtttatcgagatctgatctgttcatatacgccatgattgtacggtacgttatgataaccgcataaaataaaaatccattttcatttttaaccaatactattcataattgagattgatgtaatactttgttactttgaacgtaaagacagtacacggatccgtatctccaacaagcacgtagtaatcaaatttggtgttgttaaacttcgcaatattcatcaatttagatagaaacttatactcatcatctgttttaggaatccatgtattattaccactttccaacttatcattatcccaggctatgtttcgtccatcatcgttgcgcagagtgaataattcttttgtattcggtagttcaaatatatgatccatgcatagatcggcaaagctattgtagatgtgatttttcctaaatctaatataaaactcgtttactagcaaacactttcctgatttatcgaccaagacacatatggtttctaaatctatcaagtggtggggatccatagttatgacgcagtaacatatattattacattcttgactgtcgctaatatctaaatatttattgttatcgtattggattctgcatatagatggcttgtatgtcaaagatatagaacacataaccaatttatagtcgcgctttacattctcgaatctaaagttaagagatttagaaaacattatatcctcggatgatgttatcactgtttctggagtaggatatattaaagtctttacagatttcgtccgattcaaataaatcactaaataatatcccacattatcatctgttagagtagtatcattaaatctattatattttatgaaagatatatcactgctcacctctatatttcgtacatttttaaactgtttgtataatatctctctgatacaatcagatatatctattgtgtcggtagacgataccgttacatttgaattaatggtgttccattttacaacttttaacaagttgaccaattcatttctaatagtatcaaactctccatgattaaatattttaatagtatccattttatatcactacggacacaaagtagctgacataaaccattgtataatttttatgttttatgtttattagcgtacacattttggaagttccggcttccatgtatttcctggagagcaagtagatgatgaggaaccagatagtttatatccgtacttgcacttaaagtctacattgtcgttgtatgagtatgatcttttaaacccgctagacaagtatccgtttgatattgtaggatgtggacatttaacaatctgacacgtgggtggatcggaccattctcctcctgaacacaggacactagagttaccaatcaacgaatatccactattgcaactataagttacaacgctcccatcggtataaaaatcctcgtatccgttatgtcttccgttggatatagatggaggggattggcatttaacagattcacaaataggtgcctcgggattccataccatagatccagtagatcctaattcacaatacgatttagattcaccgatcaactgatatccgctattacaagagtacgttatactagagccaaagtctactccaccaatatcaagttggccattatcgatatctcgaggcgatgggcatctccgtttaatacattgattaaagagtgtccatccagtacctgtacatttagcatatataggtcccattttttgctttctgtatccaggtagacatagatattctatagtgtctcctatgttgtaattagcattagcatcagtctccacactattcttaaatttcatattaatgggtcgtgacggaatagtacagcatgatagaacgcatcctattcccaacaatgtcaggaacgtcacgctctccaccttcatatttatttatccgtaaaaatgttatcctggacatcgtacaaataataaaaagcccatatatgttcgctattgtagaaattgtttttcacagttgctcaaaaacgatggcagtgacttatgagttacgttacactttggagtctcatctttagtaaacatatcataatattcgatattacgagttgacatatcgaacaaattccaagtatttgattttggataatattcgtattttgcatctgctataattaagatataatcaccgcaagaacacacgaacatctttcctacatggttaaagtacatgtacaattctatccatttgtcttccttaactatatatttgtatagataattacgagtctcgtgagtaattccagtaattacatagatgtcgccgtcgtactctacagcataaactatactatgatgtctaggcatgggagacttttttatccaacgatttttagtgaaacattccacatcgtttaatactacatatttctcatacgtggtataaactccacccattacatatatatcatcgtttacgaataccgacgcgcctgaatatctaggagtaattaagtttggaagtcttatccatttcgaagtgccgtgtttcaaatattctgccacacccgttgaaatagaaaattctaatcctcctattacatataactttccatcgttaacacaagtactaacttctgattttaacgacgacatattagtaaccgttttccattttttcgttttaagatctacccgcgatacggaataaacatgtctattgttaatcatgccgccaataatgtatagacaattatgtaaaacatttgcattatagaattgtctatctgtattaccgactatcgtccaatattctgttctaggagagtaatgggttattgtggatatataatcagagtttttaatgactactatattatgttttataccatttcgtgtcactggctttgtagatttggatatagttaatcccaacaatgatatagcattgcgcatagtattagtcataaacttgggatgtaaaatgttgatgatatctacatcgtttggatttttatgtatccactttaataatatcatagctgtaacatcctcatgatttacgttaacgtcttcgtgggataagatagttgtcagttcatcctttgataattttccaaattctggatcggatgtcaccgcagtaatattgttgattatttctgacatcgacgcattatatagttttttaattccatatcttttagaaaagttaaacatccttatacaatttgtgaaattaatattatgaatcatagtttttacacatagatctactacaggcggaacatcaattattatggcagcaactagtatcatttctacattgtttatggtgatgtttatcttcttccagcgcatatagtctaatagcgattcaaacgcgtgatagtttataccattcaatataatcgcttcatcctttagatggtgatcctgaatgcgtttaaaaaaattatacggagacgccgtaataatttccttattcacttgtataatttccccattgatagaaaatattacgctttccattcttaaagtactataagtaattatagtataatgtaaacgtttatatattcaatatttttataaaaatcattttgacattaattcctttttaaatttccgtctatcatctatagaaacgtattctatgaatttataaaatgcttttacgtgtcctatcgtaggcgatagaaccgctaaaaagcctatcgaatttctacaaaagaatctgttatatggtatagggagagtataaaacattaaatgtccgtacttattaaagtattcagtagccaatcctaactctttcgaatacttattaatggctcttgttctgtacgaatctatttttttgaacaacggacctagtggtatatcttgttctatgtatctaaaataatgtctgactagatccgttagtttaatatccgcagtcatcttgtctagaatggcaaatctaactgcgggtttaggctttagtttagtttctatatctacatctatgtctttatctaacaccaaaaatataatagctaatattttattacaatcatccggatattcttctacgatctcactaactaatgtttctttggttatactagtatagtcactatcggacaaataaagaaaatcagatgatcgatgaataatacatttaaattcatcatctgtaagatttttgagatgtctcattagaatattattagggttagtactcattatcattcggcagctattacttattttattatttttcaccatatagatcaatcattagatcatcaaaatatgtttcaatcatcctaaagagtatggtgaatgactcttcccatctaatttctgaacgttcaccaatgtctctagccactttggcactaatagcgatcattcgcttagcgtcttctatattattaactggttgatttaatctatctagcaatggaccgtcggacagcgtcattctcatgttcttaatcaatgtacatacatcgccgtcatctaccaattcatccaacaacataagctttttaaaatcatcattataataggtttgatcgttgtcatttctccaaagaatatatctaataagtagagtcctcatgcttagttaacaactattttttatgttaaatcaattagtacaccgctatgtttaatacttattcatattttagtttttaggattgagaatcaatacaaaaattaatgcatcattaattttagaaatacttagtttccacgtagtcaatgaaacatttgaactcatcgtacaggacgttctcgtacaggacgtaactataaaccggtttatatttgttcaagatagatacaaatccgataactttttttacgaattctacgggatccactttaaaagtgtcataccgggttctttttatttttttaaacagatcaatggtgtgatgttgattaggtcttttacgaatttgatatagaatagcgtttacatattctccataatggtcaatcgccatttgttcgtatgtcataaattctttaattatatgacactgtgtattatttagttcatccttgttcattgttaggaatctatccaaaatggcaattatactagaactataggtgcgttgtatacacatattgatgtgtctgtttatacaatccatgatatttggatccatgctactaccttcgggtaaaattgtagcatcatataccatttctagtactttaggttcattattatccattgcagaggacgtcatgatcgaatcataaaaaaatatattatttttatgttattttgttaaaaataatcatcgaatacttcgtaagatactccttcatgaacataatcagttacaaaacgtttatatgaagtaaagtatctacgatttttacaaaagtccggatgcataagtacaaagtacgcgataaacggaataataatagatttatctagtctatctttttctatagctttcatagttagatacatggtctcagaagtaggattatgtaacatcagcttcgataaaatgactgggttatttagtcttacacattcgctcatacatgtatgaccgttaactacagagtctacactaaaatgattgaacaatagatagtctaccattgtttcgtattcagatagtacagcgtagtacatggcatcttcacaaattatatcattgtctaatagatatttgacgcatcttatggatcccacttcaacagccatcttaaaatcatattgctttcctttatcattaataatttctagaacatcatctctatcataaaagatacaaatattaactgtttgatccgtaataacattgctagtcaatagcaatttgttaataagatgcgctgggctcaatgtcttaataagaagtgtaagaggactatctccgaatttgttttgtttattaacatccgttgatggaagtaaaagatctataatgtctacattcttgactgttttagagcatacaatatggagaggtgtatttccatcatgatctggttttgagggactaattcctagtttcatcatccatgagattgtagaagcttttggattgtctgacataagatgtctatgaatatgatttttgccaaatttatccactatcctggcttcgaatccgatggacattatttttttaaacactctttctgaaggatctgtacacgccaacaacggaccacatccttcttcatcaaccgagttgttaatcttggctccatactgtaccaataaatttattctctctatgacttcatcatctgttcccgagagataatatagaggtgttttatgctgtttatcacacgcgtttggatctgcgccgtgcgtcagcagcatcgcgactattctattattattaattttagaagctatatgcaatggataatttccatcatcatccgtctcatttggagagtatcctctatgaagaagttcttcgacaaatcgttcatctagtcctttaattccacaatacgcatgtagaatgtgataattatttccagaaggttcgatagcttgtagcatattcctaaatacatctaaatttttactattatatttggcataaagagatagataatactcggccgacataatgttgtccattgtagtataaaaattaatatttctatttctatttctgtatatttgcaacaatttactctctataacaaatatcataacttagtttttttatgtcaagaaggcactggtttagttcatctataaatgtcacgccataactaccacgcatgccatactcagaattatgataaagatatttatccttggggtgtaggtaatggggattaatctttgttggatcagtctctaagttaacacatgtcacacatgatccatttatagttatatcacacgatgatgatttatgaattgattccggaagatcgctatcgtattttgtggttccacaattcatttccatacatgttattgtcacactaatattatgatgaactttatctagccgctgagtggtaaacaacagaacagatagtttattatctttaccaacaccctcagccgctgccacaaatctctgatccgtatccatgatggtcatgtttatttctagtccgtatccagtcaacactatgttagcatttctgtcgatatagctttcactcatatgacactcaccaataatagtagaattaatgtcgtaatttacaccaatagtgagttcggcggcaaagtaccaataccggtaatcttgtcgaggaggacatatagtattcttgtattctaccgaatacccgagagatgcgatacaaaagagcaagactaatttgtaaaccatcttactcaaaatatgtaacaatagtacgatgcaatgagtaagacaataggaaatctatcttatatacacataattattctatcaattttaccaattagttagtgtaatgttaacaaaaatgtgggagaatctaattagtttttctttacacaattgacgtacatgagtctgagttccttgtttttgctaattatttcatccaatttattattcttgacgatatcgagatcttttgtataggagtcaaacttgtattcaacatgcttttctataatcattttagctatttcggcatcatccaatagtacattttccagattagcagaatagatattaatgtcgtatttgaacagagcctgtaacatctcaatgtctttattatctatagccaatttaatgtccggaatgaagagaagggaattattggtgtttgtcgacgtcatatagtcgagcaagagaatcatcatatccacgtgtccattttttatagtgatgtgaatacaactaaggagaatagccagatcaaaagtagatggtatctctgaaagaaagtaggaaacaatacttacatcattaagcatgacggcatgataaaatgaagttttccatccagttttcccatagaacatcagtctccaatttttcttaacaaacagttttaccgtttgcatgttaccactatcaaccgcataatacaatgcggtgtttcccttgtcatcaaattgtgaatcatccagtccactgaatagcaaaatctttactattttggtatcttccaatgtggctgcctgatgtaatggaaattcattctctagaagatttttcaatgctccagcgttcaacaacgtacatactagacgcacgttattatcagctattgcataatacaaggcactatgtccatggacatccgccttaaatgtatctttactagagagaaagcttttcagctgcttagacttccaagtattaattcgtgacagatccatgtctgaaacgagacgctaattagtgtatattttttcattttttataattttgtcatattgcaccagaattaataatatctttaatagatctgattagtagatacatggctatcgcaaaacaacatatacacatttaataaaaataatatttattaagaaaattcagatttcacgtacccatcaatataaataaaataatgattccttacaccgtacccatattaaggagattccaccttacccataaacaatataaatccagtaatatcatgtctgatgatgaacacaaatggtgtattaaattccagtttttcaggagatgatctcgccgtagctaccataatagtagatgcctctgctacagttccttgttcgtcgacatctatctttgcattctgaaacattttataaatatataatgggtccctagtcatatgtttaaacgacgcattatctggattaaacatactaggagccatcatttcggctatcgacttaatatccctcttattttcgatagaaaatttagggagtttaagattgtacactttattccctaattgagacgaccaatagtctaattttgcagccgtgatagaatctgtgaaatgggtcatattatcacctattgccaggtacatactaatattagcatccttatacggaaggcgtaccatgtcatattctttgtcatcgattgtgattgtatttccttgcaatttagtaactacgttcatcatgggaaccgttttcgtaccgtacttattagtaaaactagcattgcgtgttttagtgatatcaaacggatattgccatatacctttaaaatatatagtattaatgattgcccatagagtattattgtcgagcatattagaatctactacattagacataccggatctacgttctactatagaattaattttattaaccgcatctcgtctaaagtttaatctatataggccgaatctatgatattgttgataatacgacggtttaatgcacacagtattatctacgaaactttgataagttagatcagtgtacgtatatttagatgttttcagcttagctaatcctgatattaattctgtaaatgctggacccagatctctttttctcaaatccatagtcttcaataattctattctagtattacctgatgcaggcaatagcgacataaacatagaaaacgaataaccaaacggtgagaagacaatattatcatcttgaatatttttatacgctactataccggcattggtaaatccttgtagacgataggcggacgctgaacacgctaacgatagtatcaataacgcaatcatgattttatggtattaataattaaccttatttttatgttcggtataaaaaaattattgatgtctacacatccttttgtaattgacatctatatatccttttgtataatcaactctaatcactttaacttttacagttttccctaccagtttatccctatattcaacatatctatccatatgcatcttaacactctctgccaagatagcttcagagtgaggatagtcaaaaagataaatatatagagcataatcattctcgtatactctgccctttattacatcacccgcattgggcaacgaataacaaaatgcaagcatcttgttaacgggctcgtaaattgggataaaaattatgtttttattgtcttatatctattttattcaagagaatattcaggaatttctttttccggttgtatctcgtcgcagtatatatcatttgtacattgtttcatattttttaatagtttacaccttttagtaggactagtatcgtacaattcatagctgtattttgaattccaatcacgcataaaaatatcttccaattgttgacgaagacctaatccatcatccggtgtaatattaatagatgctccacatgtatccgtaaagtaatttcctgtccaatttgaggtacctatataggccgttttatcggttaccatatatttggcatggtttaccctagaatacggaatgggaggatcagcatctggtacaataaatagctttacttctatatttatgtttttagattttagcatagcgatagatcttaaaaagtttctcatgataaacgaagatcgttgccagcaactaatcaatagcttaacggatacttgtctgtctatagcggatcttcttaattcatcttctatataaggccaaaacaaaattttacccgccttcgaataaataatagggataaagttcataacagatacataaacgaatttactcgcatttctaatacatgacaataaagcggttaaatcattggttctttccatagtacatagttgttgcggtgcagaagcaataaatacagagtgtggaacgccgcttacgttaatactaagaggatgatctgtattataatacgacggataaaagtttttccaattatatggtagattgttaactccaagataccagtatacctcaaaaatttgagtgagatccgctgccaagttcctattattgaagatcgcaatacccaattccttgacctgagttagtgatctccaatccatgttagcgcttcctaaataaatatgtgtattatcagatatccaaaattttgtatgaagaactcctcctaggatatttgtaatatctatgtatcgtacttcaactccggccatttgtagtctttcaacatcctttaatggtttgttagatttattaacggctactctaactcgtactcctcttttgggtaattgtacaatctcgtttaatattatcgtgccgaaattcgtacccacttcatccgataaactccaataaaaagatgatatatctagtgtttttgtggtattggatagaatttccctccacatgttaaatgtagacaaatatactttatcaaattgcatacctataggaatagtttctgtaatcactgcgattgtattatccggattcattttatttgttaaaagaataatcctatatcacttcactctattaaaaatccaagtttctatttctttcatgactgattttttaacttcatccgtttccttatgaagatgatgtttggcaccttcataaatttttatttctctattacaatttgcatgttgcatgaaataatatgcacctaaaacatcgctaatcttattgtttgttccctggagtatgagagtcggggggtgttaatcttggaaattatttttctaaccttgttggtagccttcaagacctgactagcaaatccagccttaattttttcatgattgactaatgggtcgtattggtatttataaactttatccatatctctagatactgattctggacatagctttccgactggcgcatttggtgtgatggttcccataagtttggcagctagcagattcagtcttgaaacagcatctgcattaactagaggagacattagaatcattgctgtaaacaagtttggattatcgtaagaggctagctcccatggaatgacccaataagtagatttaatagttaccacgtgctgtaccaaagtcatcaatcatcattttttcaccattacttcttccatgtccaatatgatcatgtgagaatactaaaattcctaacgatgatatgttttcagctagttcgtcataacgtccagaatgtttaccagctccatgacttatgaatactaatgccttaggatatgtaataggtttccaatatttacaatatatgtaatcattgtccagattgaacatacagtttgcactcatgattcacgttatataactatcaatattaacagttcgtttgatgatcatattatttttatgttttattgataattgtaaaaacatacaattaaatcaatatagaggaaggagacggctactgtcttttgtaagatagtcatggcgactaaattagattatgaggatgctgttttttactttgtggatgatgataaaatatgtagtcgcgactccatcatcgatctaatagatgaatatattacgtggagaaatcatgttatagtgtttaacaaagatattaccagttgtggaagactgtacaaggaattgatgaagttcgatgatgtcgctatacggtactatggtattgataaaattaatgagattgtcgaagctatgagcgaaggagaccactacatcaattttacaaaagtccatgatcaggaaagtttattcgctaccataggaatatgtgctaaaatcactgaacattggggatacaaaaagatttcagaatctagattccaatcattgggaaacattacagatttgatgaccgacgataatataaacatcttgatactttttctagaaaaaaaattgaattgatgatataggggtcttcataacgcataattattacgttagcattctatatccgtgttaaaaaaaattatcctatcatgtatttgagagttttatatgtagcaaacatgatagctgtgatgccaataagctttagatattcacgcgtgctagtgttagggatggtattatctggtggtgaaatgtccgttatataatctacaaaacaatcatcgcatatagtatgcgatagtagagtaaacatttttatagtttttactggattcatacatcgtctacccaattcggttataaatgaaattgtcgccaatcttacacccaaccccttgttatccattagcatagtattaacttcgttatttatgtcataaactgtaaatgattttgtagatgccatatcatacatgatattcatgtccctattataatcattactaactttatcacaatatatgttgataatatctatatatgatctagtctttgtgggcaactgtctatacaagtcgtctaaacgttgtttactcatatagtatcgaacagccatcattacatggtcccgttccgttgatagataatcgagtatgttagtggacttgtcaaatctatataccatattttctggaagtggatatacatagtcgtgatcaacattattgctagcctcatcttctatatcctgtactataccattatctatatcatctacataatctatgatattattacacataaacatcgacaacatactattgtttattatctaagtcctgttgatccaaacccttgatctcctctatttgtactatctagagattgtacttcttccagttctggataatatatacgttgatagattagctgagctattctatctccagtatttacattaaacgtacattttccattattaataagaatgactcctatgtttcccctataatcttcgtctattacaccacctcctatatcaatgccttttagtgacagaccagacctaggagctattctaccatagcagaacttaggcatggacatactaatatctgtcttaattaactgtctttctcctggagggatagtataatcgtaagcgctatacaaatcatatccggcagcacccggcgattgcctagtaggagatttagctctgttagtttccttaacaaatctaactggtgagttaatattcatgttgaacataaaactaatattttatttcaaaattatttaccatcccatatattccatgaataagtgtgatgattgtacacttctatagtatctatatacgatccacgataaaatcctcctatcaatagcagtttattatccactatgatcaattctggattatccctcggataaataggatcatctatcagagtccatgtattgctggattcacaataaaattccgcatttctaccaaccaagaataaccttctaccgaacactaacgcgcatgatttataatgaggataataagtggatggtccaaactgccactgatcatgattgggtagcaaatattctgtagttgtatcagtttcagaatgtcctcccattacgtatataacattgtttatggatgccactgctggattacatctaggtttcagaagactcggcatattaacccaagcagcatccccgtggaaccaacgctcaacagatgtgggatttggtagacctcctactacgtataatttattgttagcgggtatcccgctagcatacagtctggggctattcatcggaggaattggaatccaattgtttgatatataatttacagctatagcattgttatgtatttcattgttcatccatccaccgatgagatatactacttctccaacatgagtacttgtacacatatggaatatatctataatttgatccatgttcataggatactctatgaatggatacttgtatgatttgcgtggttgtttatcacaatgaaatattttggtacagtctagtatccattttacattatttatacctctgggagaaagataatttgacctgattacatttttgataaggagtagcagatttcctaatttatttcttcgcctcatataccacttaatgacaaaatcaactacataatcctcatctggaacatttagttcatcgctttctagaataagtttcatagatagataatcaaaattgtctatgatgtcatcttccagttccaaaaagtgtttggcaataaagtttttagtatgacataagagattggatagtccgtattctatacccatcatgtaacactcgacacaatattcctttctaaaatctcgtaagataaagtttatacaagtgtagatgataaattctacagaggttaatatagaagcacgtaataaattgacgacgttatgactatctatatatacctttccagtatatgagtaaataactatagaagttaaactgtgaatgtcaaggtctagacaaacccttgtaactggatctttatttttcgtgtatttttgacgtaaatgtgtgcgaaagtaaggagataactttttcaatatcgtagaattgactattatattgcctcctatggcatcaataattgttttgaatttcttagtcatagacaatgctaatatattcttacagtacacagtattgacaaatatcggcatttatgtttctttaaaagtcaacatctagagaaaaatgattatctttttgagacataactcccattttttggtattcacccacacgtttttcgaaaaaattagtttttccttccaatgatatattttccatgaaatcaaacggattggtaacattataaatttttttaaatcccaattcagaaatcaatctatccgcgacgaattctatatatgttttcatcatttcacaattcattcctataagtttaactggaagagccgcagtaagaaattcttgttcaatggatactgcatctgttataatagatctaacggtttcttcactcggtggatgcaataaatgtttaaacatcaaacatgcgaaatcgcagtgcagaccctcgtctctactaattagttcgttggaaaacgtgagtccgggcattaggccacgctttttaagccaaaatatggaagcgaatgatccagaaaagaaaattccttctactgcagcaaaggcaataagtctctctccataaccggcgctgtcatgtatccacttttgagcccaatcggccttcttttttacacaaggcatcgtttctatggcattaaagagatagtttttttcattactatctttaacataagtatcgatcaaaagactatacatttccgaatgaatgttttcaatggccatctgaaatccgtagaaacatctagcctcggtaatctgtacttctgtacaaaatcgttccgccaaattttcattcactattccgtcactggctgcaaaaaacgccaatacatgttttataaaatatttttcgtctggtgttagtttattccaatcattgatatctttagatatatctacttcttccactgtccaaaatgatgcctctgcctttttatacatgttccagatgtcatgatattggattgggaaaataacaaatctatttggatttggtgcaaggatgggttccataactaaattaacaataacaataaattttttttcagttatctatatgcctgtacttggattttttgtacatcgatatcgccgcaatcactacaataattacaagtattattgatagcattgttattagtactatcataattaaattatctacattcatgggtgctgaataatcgttattatcatcattatcattttgtaattgtgacatcatactagataaatcgtttgcgagattgttgtgggaagcgggcatggaggatgcattatcattattatttaacgccttccatttggattcacaaatgttacgcacattcaacattttatggaaactataattttgtgaaaacaaataacaagaaaactcgtcatcgttcaaatttttaacgatagtaaaccgattaaacgtcgagctaatttctaacgctagcgactctgttggatatgggtttccagatatatatcttttcagttcccctacgtatctataatcatctgtaggaaatggaagatatttccatttatctactgttcctaatatcatatgtggtggtgtagtagaaccattaagcgcgaaagatgttatttcgcatcgtattttaacttcgcaataatttctggttagataacgcactctaccagtcaagtcaatgatattagcctttacagatatattcatagtagtcgtaacgatgactccatcttttagatgcgatactcctttgtatgtaccagaatcttcgtacctcaaactcgatatatttaaacaagttaatgagatattaacgcgttttatgaatgatgatatataaccagaagttttatcctcggtggctagcgctataaccttatcattataataccaactagtgtgattaatatgtgacacgtcagtgtgggtacaaatatgtacattatcgtctacgtcgtattcgatacatccgcatacagccaacaaatataaaatgacaaatactctaacgccgttcgtacccatcttgatgcggtttaataaatgttttgatttcaatttattgtaaaaaaagattcggttttatactgttcgatattctcattgcttatattttcatctatcatctccacacagtcaaatccgtggttagcatgcacctcatcaaccggtaaaagactatcggactcttctatcattataactctagaatatttaatttggtcattattaatcaagtcaattatcttatttttaacaaacgtgagtattttactcattttttataaaaacttttagaaatatacagactctatcgtgtgtctatatcttctttttatatccaatgtatttatgtctgatttttcttcatttatcatatataatggtccaaattctacacgtgcttcggattcatccagatcattaaggttcttataattgtaacatccttctcttccctcttctacatcttccttcttattcttattcttagcgtcacagaatctaccacagcaggatcccatgacgagcgtcatattaaactaatccattttcaattataatatatgattagtaatgaccattaaaataaaaaatattcttcataaccggcaagaaagtgaaaagttcacattgaaactatgtcagtagtatacatcatgaaatgatgatatatatatactctattttggtggaggattatatgatataattcgtggataatcatttttaagacacatttctttattcgtaaatcttttcacgttaaatgagtgtccatattttgcaatttcttcatatgatggcggtgtacgtggacgaggctgctcctgttcttgttgtggtcgccgactgtcgtgtctgcgtttagatccctccattatcgcgattgcgtagatggagtactattttataccttgtaattaaatttttttattaattaaacgtataaaaacgttccgtatctgtatttaagagccagatttcgtctaatagaacaaatagctacagtaaaaataactagaataattgctacacccactagaaaccacggatcgtaatacggcaatcggttttcgataataggtggaacgtatattttatttaaggacttaacaattgtctgtaaaccacaatttgcttccgcggatcctgtattaactatctgtaaaagcatatgttgaccgggcggagccgaacattctccgatatctaatttctgtatatctataatattattaacctccgcatacgcattacagttcttttctagcttggataccgcactaggtacatcgtctagatctattcctatttcctcagcgatagctcttctatccttttccggaagcaatgaaatcacttcaataaatgattcaaccatgagtgtgaaactaagtcgagaattactcatgcatttgttagttattcggagcgcgcaatttttaaactgtcctataacctctcctatatgaatagcacaagtgacattagtagggatagaatgttgagctaatttttgtaaataactatctataaaaagattatacaaagttttaaactctttagtttccgccatttatccagtctgagaaaatgtctctcataataaatttttccaagaaactaattgggtgaagaatggaaacctttaatctatatttatcacagtctgttttggtacacatgatgaattcttccaatgccgtactaaattcgatatctttttcgatttctggatatgtttttaataaagtatgaacaaagaaatggaaatcgtaataccagttatgtttaactttgaaattgttttttattttcttgttaatgattccagccacttgggaaaagtcaaagtcgtttaatgccgatttaatacgttcattaaaaacaaactttttatcctttagatgaattattattggttcattggaatcaaaaagtaagatattatcgggtttaagatctgcgtgtaaaaagttgtcgcaacagggtagttcgtagattttaatgtataacagagccatctgtaaaaagataaactttatgtattgtaccaaagatttaaatcctaatttgatagctaactcggtatctactttatctgccgaatacagtgctaggggaaaaattataatgtttcctctttcatattcgtagttagttctcttttcatgttcgaaaaagtgaaacatgcggttaaaatagtttataacattaatattactgttaataactgccggataaaagtgggatagtaatttcacgaatttgatactgtcctttctctcgttaaacgcctttaaaaaaactttagaagaatatctcaatgagagttcctgaccatccatagtttgtatcaataatagcaacatatgaagaacacgtttatacagagtatgtaaaaatgttaatttatagtttaatcccatggcccacgcacacacgattaattttttttcatctccctttagattgttgtatagaaatttgggtactgtgaactccgccgtagtttccatgggactatataattttgtggcctcgaatacaaattttactacatagttatctatcttaaagactataccatatcctcctgtagatatgtgataaaaatcgtcgtttataggataaaatcgtttatccttttgttggaaaaaggatgaattaatgtaatcattctcttctatctttagtagtgtttccttattaaaattcttaaaataatttaacaatctaactgacggagcccaattttggtgtaaatctaattgggacattatattgttaaaatacaaacagtctcctaatataacagtatctgataatctatggggagacatccattgatattcaggggatgaatcattggcaacacccatttattgtacaaaaagccccaatttacaaacgaaagtccaggtttgatagagacaaacaattaactattttgtctctgtttttaacacctccacagtttttaatttctttagtaatgaaattattcacaatatcagtatcttctttatctaccagagattttactaacttgataaccttggctgtctcattcaatagggtagtaatatttgtatgtgtgatattgatatctttttgaattgtttcttttagaagtgattctttgatggtgccagcatacgaattacaataatgcagaaactcggttaacatgcaggaattatagtaagccaattccaattgttgcctgtgttgtattagagtgtcaatatgagcaatggtgtccttgcgtttctctgatagaatgcgagcagcgattttggcgttatcatttgacgatatttctggaatgacgaatcctgtttctactaactttttggtaggacaaagtgaaacaatcaagaagatagcttctcctcctatttgtggaagaaattgaactcctctagatgatctactgacgatagtatctccttgacagatattggaccgaattacagaagtacctggaatgtaaagccctgaaaccccctcattttttaagcagattgttgccgtaaatcctgcactatgcccaagatagagagctcctttggtgaatccatctctatgtttcagtttaaccaagaaacagtcagctggtctaaaatttccatctctatctaatacagcatctaacttgatgtcaggaactatgaccggtttaatgttatatgtaacattgagtaaatccttaagttcataatcatcactgtcatcagttatgtacgatccaaacaatgtttctaccggcatagtggatacgaagatgctatccatcagaatgtttccctgattagtattttctatatagctattcttctttaaacgattttccaaatcagtaactatgttcatttttttaggagtaggacgcctagccagtatggaagaggattttctagatcctctcttcaacatctttgatctcgatggaatgcaaaaccccatagtgaaacaaccaacgataaaaataatattgtttttcactttttataattttaccatctgactcatggattcattaatatctttataagagctactaacgtataattctttataactgaactgagatatatacaccggatctatggtttccataattgagtaaatgaatgctcggcaataactaatggcaaatgtatagaacaacgaaattatactagagttgttaaagttaatattttctatgagctgttccaataaattatttgttgtgactgcgttcaagtcataaatcatcttgatactatccagtaaaccgtttttaagttctggaatattatcatcccattgtaaagcccctaattcgactatcgaatatcctgctctgatagcagtttcaatatcgacggacgtcaatactgtaataaaggtggtagtattgtcatcatcgtgataaactacgggaatatggtcgttagtaggtacggtaactttacacaacgcgatatataactttccttttgtaccatttttaacgtagttgggacgtcctgcagggtattgttttgaagaaatgatatcgagaacagatttgatacgatatttgttggattcctgattattcactataatataatctagacagatagatgattcgataaatagagaaggtatatcgttggtaggataatacatccccattccagtattctcggatactctattgatgacactagttaagaacatgtcttctattctagaaaacgaaaacatcctacatggactcattaaaacttctaacgctcctgattgtgtctcgaatgcctcgtacaaggatttcaaggatgccatagattctttgaccaacgatttagaattgcgtttagcatctgatttttttattaaatcgaatggtcggctctctggtttgctaccccaatgataacaatagtcttgtaaagataaaccgcaagaaaatttatacgcatccatccaaataaccctagcaccatcggatgatattaatgtattattatagattttccatccacaattattgggccagtatactgttagcaacggtatatcgaatagattactcatgtaacctactagaatgatagttcgtgtactagtcataatatctttaatccaatctaaaaaatttaaaattagattttttacactgttaaagttaacaaaagtattacccgggtacgtggatatcatatatggcattggtccattatcagtaatagctccataaactgatacggcgatggtttttatatgtgtttgatctaacgaggaagaaattcgcgcccacaattcatctctagatatgtatttaatatcaaacggtaacacatcaatttcgggacgcgtatatgtttctaaatttttaatccaaatataatgatgacctatatgccctattatcatactgtcaactatagtacacctagggaacttacgatacatctgtttcctataatcgttaaattttacaaatctataacatgctaaaccttttgacgacagccattcattaatttctgatatggaatctgtattctcgataccgtatcgttctaaagccagtgctatatctccctgttcgtgggaacgctttcgtataatatcgatcaacggataatctgaagtttttggagaataatatgactcatgatctatttcgtccataaacaatctagacataggaattggaggcgatgatcttaattttgtgcaatgagtcgtcaatcctataacttctaatcttgtaatattcatcatcgacataatactatctatgttatcatcgtatattagtataccatgaccttcttcatttcgtgccaaaatgatatacagtcttaaatagttacgcaatatctcaatagtttcataattgttagctgttttcatcaaggtttgtatcctgtttaacatgatggcgttctataacgtctctattttctatttttaattttttaaatttttaacgatttactgtggctagatacccaatctctctcaaatatttttttagcctcgcttacaagctgtttatctatactattaaaactgacgaatccgtgattttggtaatgggttccgtcgaaatttgccgaagtgatatgaacatattcgtcgtcgactatcaacaattttgtattattctgaatagtgaaaaccttcacagatagatcattttgaacacacaacgcatctagacttttggcggttgccatagaatatacgtcgttcttatcccaattaccaactagaagtctgatcttaactcctctattaatggctgcttctataatggagttgtaaatgtcgggccaatagtagctattaccgtcgacacgtgtagtgggaactatggccaaatgttcaatatctatactagtcttagctgacctgagtttatcaataactacatcggtatctagatctctagaatatcccaataggtgttccggagaatcagtaaagaacactccacctataggattcttaatatgatacgcagtgctaactggcaaacaacaagccgcagagcataaattcaaccatgaattttttgcgctattaaaggctttaaaagtatcaaatcttctacgaagatctgtggccagcgggggataatcagaatatacacctaacgttttaatcgtatgtatagatcctccagtaaatgacgcgtttcctacataacatctttcatcatctgacacccaaaaacaaccgagtagtagtcccacattattttttttatctatattaacggttataaaatttatatccgggcagtgactttgtagctctcccagatttcttttccctcgttcatctagcaaaactattattttaatccctttttcagatgcctcttttagtttatcaaaaataagcgctcccctagtcgtactcagaggattacaacaaaaagatgctatgtatatatatttcttagctagagtgataatttcgttaaaacattcaaatgttgttaaatgatcggatctaaaatccatattttctggtagtgtttctaccagcctacattttgctcccgcaggtaccgatgcaaatggccacatttagttaacataaaaacttatacatcctgttctatcaacgattctagaatatcatcggctatatcgctaaaattttcatcaaagtcgacatcacaacctaactcagtcaatatattaagaagttccatgatgtcatcttcgtctatttctatatccgtatccattgtagattgttgaccgattatcgagtttaaatcattactaatactcaatccttcagaatacaatctgtgtttcattgtaaatttataggcggtgtatttaagttggtagattttcaattatgtattaatatagcaacagtagttcttgctcctccttgattctagcatcctcttcattattttcttctacgtacataaacatgtccaatacgttagacaacacaccgacgatggcggccgcaggatcctgcgaagcttacagacacgaatatgactaaaccgatgaccatttaaaaacccctctctagctttcacttaaactgtatcgatcattcttttagcacatgtataatataaaaacattattctatttcgaatttaggcttccaaaaatttttcatccgtaaaccgataataatatatatagacttgttaatagtcggaataaatagattaatgcttaaactatcatcatctccacgattagagatacaatatttacattctttttgctgtttcgaaactttatcaatacacgttaatacaaacccaggaaggagatattgaaactgaggctgttgaaaatgaaacggtgaatacaataattcagataatgtaaaatcatgattccgtattctgatgatattagaactgctaatggatgtcgatggtatgtatctaggagtatctattttaacaaagcatcgatttgctaatatacaattatccttttgattaattgttattttattcatattcttaaaaggtttcatatttatcaattcttctacattaaaaatttccatttttaatttatgtagccccgcaatactcctcattacgtttcattttttgtctataatatccattttgttcatctcggtacatagattatccaattgagaagcgcatttagtagttttgtacattttaagtttattgacgaatcgtcgaaaactagttatagttaacattttattatttgataccctgatattaatacccctgccgttactattatttataactgatgtaatccacgtaacattggaattaactatcgatagtaatgcatcgacgcttccaaaattgtctattataaactcaccgataatttttttattgcatgttttcatattcattaggattatcaaatctttaatcttattacgattgtatgcgttgatattacaagacgtcattctaaaagacggaggatctccatcaaatgccagacaatcacgtacaaagtacatggaaataggttttgttctattgcgcatcatagatttatatagaacacccgtagaaatactaatttgttttactctataaaatactaatgcatctatttcatcgttttgtataacgtctttccaagtgtcaaattccaaatttttttcattgatagtaccaaattcttctatctctttaactacttgcatagataggtaattacagtgatgcctacatgccgttttttgaaactgaatagatgcgtctagaagcgatgctacgctagtcacaatcaccactttcatatttagaatatatatatgtaaaaatatagtagaatttcattttgtttttttctatgctataaatgaattctcattttgcatctgctcatactccgttttatattaataccaaagaaggaagatatctggttctaaaagccgttaaagtatgcgatgttagaactgtagaatgcgaaggaagtaaagcttcctgcgtactcaaagtagataaaccctcatcgcccgcgtgtgagagaagaccttcgtccccgtccagatgcgagagaatgaataaccctggaaaacaagttccgtttatgaggacggacatgctacaaaatatgttcgcggctaatcgcgataatgtagcttctagacttttgtcctaaaatactattatatccttttcgatattaataaatccgtgtcgtccaggttttttatctctttcagtatgtgaatagataggtattttatctctattcatcatcgaatttaagagatccgataaacattgtttgtattctccagatgtcagcatctgatacaacaatatatgtgcacataaacctctggcacttatttcatgtaccttccccttatcactaaggagaatagtatttgagaaatatgtatacatgatattatcatgaattagatatacagaatttgtaacactctcgaaatcacacgatgtgtcggcgttaagatctaatatatcactcgataacacattttcatctagatacactagacattttttaaagctaaaatagtctttagtagtaacagtaactatgcgattattttcatcgatgatacatttcatcggcatattattacgcttaccatcaaagactataccatgtgtatatctaacgtattctagcatggttgccatacgcgcattaaacttttcaggatctttggatagatcttccaatctatctatttgagaaaacatttttatcatgttcaatagttgaaacgtcggatccactatatagatattatctataaagattttaggaactacgttcatggtatcctggcgaatattaaaactatcaatgatatgattatcgttttcatcttttatcaccatatagtttctaagatatgggattttacttaatataatattatttcccgtgataaattttattagaaaggccaaatctataagaaaagtcctagaattagtctgaagaatatctatatcgccgtatagtatatttggattaattagatatagagaatatgatccgtaacatatacaacttttattatggcgtctaagatattcttccatcaacttattaacatttttgactagggaagatacattatgacgtcccattacttttgccttgtctattactgcgacgttcatagaatttagcatatctcttgccaattcttccattgatgttacattataagaaattttagatgaaattacatttggagctttaatagtaagaactcctaatatgtccgtgtatgtggtcactaatacagattgtagttctataatcgtaaataatttacctatattatatgtttgagtctgtttagaaaagtagctaagtatacgatcttttatttctgatgcagatgtattaacatcggaaaaaaatctttttttattcttttttactaaagatacaaatatgtctttgttaaaaacagttattttctgaatatttctagcttgtaattttaacatatgatattcgttcacactaggtactctgcctaaataggtttctataatctttaatgtaatattaggaaaagtattctgatcaggattcctattcattttgaggatttaaaactctgattattgtctaatatggtctctacgcaaactttttcacagagcgatagagtttttgataactcgtttttcttaagaaatataaaactactgtctccagagctcgctctatcttttattttatctaattcgatacaaactcctgatactggttcagaaagtaattcattaattttcagtcctttatagaagatatttaatatagataatacaaaatcttcagtttttgatatcgatctgattgatcctagaactagatatattaataacgtgctcattaggcagtttatggcagcttgataattagatatagtatattccagttcatatttattagataccgcattgcccagattttgatattctatgaattcctctgaaaataaatccaaaataactagacattctattttttgtggattagtgtactctcttccctctatcatgttcactactggtgtccacgatgataaatatctagagggaatataatatagtccataggatgccaatctagcaatgtcgaataactgtaattttattcttcgctcttcattatgaattgattcttgaggtataaacctaacacaaattatattattagacttttcgtatgtaatgtctttcatgttataagtttttaatcctggaatagaatctattttaatgaggcttttaaacgcagagttctccaacgagtcaaagcataatactctgttgtttttcttatatacgatgttacgattttcttctttgaatggaataggtttttgaattagtttataattacaacataatagataaggaagtgtgcaaatagtacgcggaaaaaacataatagctcccctgttttcatccatggttttaagtaaatgatcactggcttctttagtcaatggatattcgaacattaaccgtttcatcatcattggacagaatccatatttcttaatgtaaagagtgatcaaatcattgtgtttattgtaccatcttgttgtaaatgtgtattcggttatcggatctgctcctttttctattaaagtatcgatgtcaatctcgtctaagaattcaactatatcgacatatttcatttgtatacacataaccattactaacgtagaatgtataggaagagatgtaacgggaacagggtttgttgattcgcaaactattctaatacataattcttctgttaatacgtcttgcacgtaatctattatagatgccaagatatctatataattattttgtaagatgatgttaactatgtgatctatataagtagtgtaataattcatgtattttgatatatgttccaactctgtctttgtgatgtctagtttcgtaatatctatagcatcctcaaaaaatatattcgcatatattcccaagtcttcagttctatcttctaaaaaatcttcaacgtatggaatataataatctattttacctcttctgatatcattaatgatatagtttttgacactatcttctgtcaattgattcttattcactatatctaagaaacggatagcgtccctaggacgaactactgccattaatatctctattatagcttctggacataattcatctattataccagaattaatgggaactattccgtatctatctaacatagttttaagaaagtcagaatctaagacttgatgttcatatattggttcatacatgaaatgatctctattgatgatagtgactatttcattctctgaaaattggtaactcattctatatatgctttccttgttgatgaaggatagaatatactcaatagaatttgtaccaacaaactgttctcttatgaatcgtatatcatcatctgaaataatcatgtaaggcatacatttaacaattagagacttgtctcctgttatcaatatactattcttgtgataatttatgtgtgaggcaaatttgtccacgttctttaattttgttatagtagatatcaaatccaatggagctacagttcttggcttaaacagatatagtttttctggaacaaattctacaacattattataaaggactttgggtagataagtgggatgaaatcctattttaattaatgcgatagccttgtcctcgtgcagatatccaaacgcttttgtgatagtatggcattcattgtctagaaacgctctacgaatatctgtgacagatatcatctttagagaatatactagtcgcgttaatagtactacaatttgtattttttaatctatctcaataaaaaaattaatatgtatgattcaatgtataactaaactactaactgttattgataactagaatcagaatctaatgatgacgtaaccaagaagtttatctactgccaatttagctgcattatttttagcatctcgtttagattttccatcggccttatcgaatactcttccgtcgatgtctacacaggcataaaatgtaggagagttactaggcccaactgattcaatacgaaaagaccaatctctcctagtaatttggcagtactcattaataacggtgacagggttagcatctttccaatcaataatttttttagccggaataacatcatcaaaagacttatgatcctctctcattgatttttcgcgggatacatcatctattatgacgtcagccatagcatcagcatccggcttatccgcctccgttgtcataaaccaacgaggaggaatatcgtcggagctgtacaccatagcactacgttgaagatcgtacagagctttattaacttctcgcttctccatattaagttgtctagttagttgtgcagcagtagctccttcgattccaatgtttttaatagccgcacacacaatctctgcgtcagaacgctcgtcaatatagatcttagacatttttagagagaactaacgcaaccagcaataaaactgaacctactttatcatttttttattcatcatcctctggtggttcgtcgttcctatcaaatgtagctctgattaacccgtcatctataggtgatgctggttctggagattctggaggagatggattattatctggaagaatctctgttatttccttgttttcatgtatcgattgcgttgtaacattaagattgcgaaatgctctaaatttgggaggcttaaagtgttgtttgcaatctctacacgcgtgtctaactagtggaggttcgtcagctgctctagtttgaatcatcatcggcgtagtattcctacttttacagttaggacacggtgtattgtatttctcgtcgagaacgttaaaataatcgttgtaactcacatcctttattttatctatattgtattctactcctttcttaatgcattttataccgaataagagatagcgaaggaattctttttcggtgccgctagtacccttaatcatatcacatagtgttttatattccaaatttgtggcaatagacggtttatttctatacgatagtttgtttctggaatcctttgagtattctataccaatattattctttgattcgaatttagtttcttcgatattagattttgtattacctatattcttgatgtagtactttgatgatttttccatggcccattctattaagtcttccaagttggcatcatccacatattgtgatagtaattctcggatatcagtagcggctaccgccattgatgtttgttcattggatgagtaactactaatgtatacattttccatttataacacttatgtattaactttgttcatttatattttttcattattatgttgatattaacaaaagtgaatatatatatgttaataattgtattgtggttatacggctacaattttataatgagtgaaagtcagtgtccgatgatcaatgacgatagctttactctgaaaagaaagtatcaaatcgatagtgcggagtcaacaataaaaatggataagaagaggataaagtttcagaatagagccaaaatggtaaaagaaataaatcagacaataagagcagcacaaactcattacgagacattgaaactaggatacataaaatttaagagaatgattatgactactactctagaagatatagcaccatctattccaaataatcagaaaacttataaactattctcggacatttcagccatcggcaaagcatcacagaatccgagtaagatggtatatgctctgctgctttacatgtttcccaatttgtttggagatgatcatagattcattcgttatagaatgcatccaatgagtaaaatcaaacacaagatcttctctcctttcaaacttaatcttattagaatattagtggaagaaagattctataataatgaatgcagatctaataaatggagaataattggaacacaagttgataaaatgttgatagctgaatctgataaatatacaatagatgcaaggtataacctaaaacccatgtatagaatcaagggagaatctgaagaagataccctctttatcaaacagatggtagaacaatgtgtgacatcccaggaattggtggaaaaagtgttgaagatactgtttagagatttgttcaagagtggagaatacaaagcgtacagatacgatgatgatgtagaaaatggatttattggattggatacactaaaattaaacattgttcatgatatagttgaaccatgtatgcctgttcgtaggccagtggctaagatactgtgtaaagaaatggtaaataaatactttgagaatccgctacatattattggtaaaaatcttcaagagtgcattgactttgttagtgaataggcatttcatctttctccaatactaattcaaattgttaaattaataatggatagtataaatagttattagttataagatagtaaaaataattattagaataagagtgtagtatcatagataactctcttctataaaaatggattttattcgtagaaagtatcttatatacacagtagaaaataatatagattttttaaaggatgatacattaagtaaagtaaacaattttaccctcaatcatgtactagctctcaagtatctagttagcaattttcctcaacacgttattactaaggatgtattagctaataccaatttttttgttttcatacatatggtacgatgttgtaaagtgtacgaagcggttttacgacacgcatttgatgcacccacgttgtacgttaaagcattgactaagaattatttatcgtttagtaacgcaatacaatcgtacaaggaaaccgtgcataaactaacacaagatgaaaaatttttagaggttgccgaatacatggacgaattaggagaacttataggcgtaaattatgacttagttcttaatccattatttcacggaggggaacccatcaaagatatggaaatcatttttttaaaactgtttaagaaaacagacttcaaagttgttaaaaaattaagtgttataagattacttatttgggcatacctaagcaagaaagatacaggcatagagtttgcggataatgatagacaaaatatatacactctatttcaacaaactggtagaatcgtccatagcaatctaacagaaacgtttagagattatatctttcccggagataagactagctattgggtgtggttaaacgaaagtatagctaatgatgcggatatcgttcttaatagacacgccattaccatgtatgataaaattcttagttatatatactctgagataaaacaaggacgcgttaataaaaacatgcttaagttagtttatatctttgagcctgaaaaagatatcagagaacttctgctagaaatcatatatgatattcctggagatatcctatctattattgatgcaaaaaacgacgattggaaaaaatattttattagtttttataaagctaattttattaacggtaatacatttattagtgatagaacgtttaacgaggacttattcagagttgttgttcaaatagatcccgaatatttcgataatgaacgaattatgtctttattctctacgagtgctgcggacattaaacgatttgatgagttagatattaataacagttatatatctaatataatttatgaggtgaacgatatcacattagatacaatggatgatatgaagaagtgtcaaatctttaacgaggatacgtcgtattatgttaaggaatacaatacatacctgtttttgcacgagtcggatcccatggtcatagagaacggaatactaaagaaactgtcatctataaaatccaagagtagacggctgaacttgtttagcaaaaacattttaaaatattatttagacggacaattggctcgtctaggtcttgtgttagatgattataaaggagacttgttagttaaaatgataaaccatcttaagtctgtggaggatgtatccgcattcgttcgattttctacagataaaaaccctagtattcttccatcgctaatcaaaactattttagctagttataatatttccatcatcgtcttatttcaaaggtttttgagagataatctatatcatgtagaagaattcttggataaaagcatccatctaaccaagacggataagaaatatatacttcaattgataagacacggtagatcatagaacagaccaaatatattattaataatttgtatatacatagatataattatcacacatttttgataaatgggaactgctgcaacaattcagactcccaccaaattaatgaataaagaaaatgcagaaatgattttggaaaaaattgttgatcatatagttatgtatattagtgacgaatcaagtgattcagaaaataatcctgaatatattgattttcgtaacagatacgaagactatagatctctcattataaaaagtgatcacgagtttgtaaagctatgtaaaaatcatgcggagaaaagttctccagaaacgcaacaaatgattatcaaacacatatacgaacaatatcttattccagtatctgaagtactattaaaacctataatgtccatgggtgacataattacatataacggatgtaaagacaatgaatggatgctagaacaactctctaccctaaactttaacaatctccgcacatggaactcatgtagcataggcaatgtaacgcgtctgttttatacattttttagttatctgatgaaagataaactaaatatataagtataatcccattctaatactttaacctgatgtattagcatcttattagaatattaacctaactaaaagacataacataaaaactcattacatagttgataaaaagcggtaggatataaatattatggctgccaccgttccgcgttttgacgacgtgtacaaaaatgcacaaagaagaattctagatcaagaaacattttttagtagaggtctaagtagaccgttaatgaaaaacacatatctatttgataattacgcgtatggatggataccagaaactgcaatttggagtagtagatacgcaaacctagatgctagtgactattatcccatttcgttgggattacttaaaaagttcgagtttctcatgtctctatataaaggtcctattcccgtatatgaagaaaaagtaaatactgaattcatagccaatggatcgttctctggtagatacgtatcatatcttcgaaagttttctgcccttccaacaaacgagtttattagttttttgttactgacttccattccaatctataatatcttgttctggtttaaaaacacacagtttgatattactaaacacacattattcagatacgtctatacagataatgccaaacacctggcgttggctaggtatatgcatcaaacaggagactataagcctttgtttagtcgtctcaaagagaattatatatttaccggtcccgttccaataagtatcaaagatatagatcaccctaatcttagtagagcaagaagtccatccgattatgagacattagctaatattagtactatattgtactttaccaagtatgatccggtattaatgtttttattgttttacgtacctgggtattcaattactacaaaaattactccagccgtagaatatctaatggataaactgaatctaacaaagagcgacgtacaactgttgtaaattattttatgcttcgtaaaatgtaggttttgaaccaaacattctttcaaagaatgagatgcataaaactttattatccaatagattgactatttcggacgtcaatcgtttaaagtaaacttcgtaaaatattctttgatcactgccgagtttaaaacttctatcgataattgtctcatatgttttaatatttacaagttttttggtccatggtacattagccggacaaatatatgcaaaataatatcgttctccaagttctatagtttctggattatttttattatattcagtaactaaatacatattagggttatctgcggatttataatttgagtgatgcattctactcaacataaataattctagaggagacgatctactatcaaattcggatcgtaaatctgtttctaaagaacggagaatatctatacatacctgattagaattcatccgtccttcagacaacatctcagacagtctggttttgtacatcttaatcatattcttatgaaacttggaaacatctcttctagtttcactagtacctttattaattctctcaggtacagattttgaattcgacgatgctgagtatttcatcgttgtatatttcttcttcgattgcataatcagattcttatataccgcctcaaactctattttaaaattattaaacaatactctattattaatcagtcgttctaactctttcgctatttctatagacttatctacatcttgactgtctatctctgtaaacacggagtcggtatctccatacacgctacgaaaacgaaatctgtaatctataggcaacgatgttttcacaatcggattaatatctctatcgtccatataaaatggattacttaatggattggcaaaccgtaacataccgttagataactctgctccatttagtaccgattctagatacaagatcattctacgtcctatggatgtgcaactcttagccgaagcgtatgagtatagagcactatttctaaatcccatcagaccatatactgagttggctactatcttgtacgtatattgcatggaatcatagatggccttttcagttgaactggtagcctgttttagcatctttttatatctggctctctctgccaaaaatgttcttaatagtctaggaatggttccttctatcgatctatcgaaaattgctatttcagagatgaggttcggtagtctaggttcacaatgaaccgtaatatatctaggaggtggatatttctgaagcaatagctgattatttatttcttcttccaatctattggtactaacaacgacaccgactaatgtttccggagatagatttccaaagatacacacattaggatacagactgttataatcaaagattaatacattattactaaacattttttgttttggagcaaataccttaccgccttcataaggaaacttttgttttgtttctgatctaactaagatagttttagtttccaacaatagctttaacagtggacccttgatgactgtactcgctctatattcgaataccatggattgaggaagcacatatgttgacgcacccgcgtctgtttttgtttctactccataatactcccacaaatactgacacaaacaagcatcatgaatacagtatctagccatatctaaagctatgtttagattataatccttatacatctgagctaaatcaacgtcatcctttccgaaagataatttatatgtatcattaggtaaagtaggacataatagtacgactttaaatccattttcccaaatatctttacgaattactttacatataatatcctcatcaacagtcacataattacctgtggttaaaacctttgcaaatgcagcggctttgcctttcgcgtctgtagtatcgtcaccgatgaacgtcatttctctaactcctctatttaatactttacccatgcaactgaacgcgttcttggatatagaatccaatttgtacgaatccaatttttcaaatttttgaatgaatgaatatagatcgaaaaatatagttccattattgttattaacgtgaaacgtagtattggccatgccgcctactcccttatgactagactgatttctctcataaatacagagatgtacagcttcctttttgtccggagatctaaagataattttctctcctgttaataactctagacgattagtaatatatctcagatcaaagttatgtccgttaaaggtaacgacgtagtcgaacgttagttccaacaattgtttagctattcgtaacaaaactatttcagaacatagaactagttctcgttcgtaatccatttccattagtgactgtatcctcaaacatcctctatcgacggcttcttgtatttcctgttccgttaacatctcttcattaatgagcgtaaacaataatcgtttaccacttaaatcgatataacagtaacttgtatgcgagattgggttaataaatacagaaggaaacttcttatcgaagtgacactctatatctagaaataagtacgatcttgggatatcgaatctaggtatttttttagcgaaacagttacgtggatcgtcacaatgataacatccattgttaatctttgtcaaatattgctcgtccaacgagtaacatccgtctggagatatcccgttagaaatataaaaccaactaatattgagaaattcatccatggtggcattttgtatgctgcgtttctttggctcttctatcaaccacatatctgcgacggagcattttctatctttaatatctagattataacttattgtctcgtcaatgtctatagttctcatctttcccaacggcctcgcattaaatggaggaggagacaatgactgatatatttcgtccgtcactacgtaataaaagtaatgaggaaatcgtataaatacggtctcgccatttcgacatctggatttcagatataaaaatctgttttcaccgtgactttcaaaccaattaatgcaccgaacatccatttatagaatttagaaatatattttcatttaaatgaatcccaaacattggggaagagccgtatggaccattatttttatagtactttcgcaagcgggtttagacggcaacatagaagcgtgtaaacgaaaactatatactatagttagcactcttccatgtcctgcatgtagacggcacgcgactatcgctatagaggacaataatgtcatgtctagcgatgatctgaattatatttattattttttcatcagattatttaacaatttggcatctgatcccaaatacgcgatcgatgtgacaaaggttaaccctttataaacttaacccattataaaacttatgattagtcacaactgaaataaccgcgtgattattttttggtataattctacacggcatggtttctgtgactatgaattcaacccccgttacattagtgaaatctttaacaaacagcaagggttcgtcaaagacataaaactcattgtttacaatcgaaatagaccccctatcacacttaaaataaaaaatatccttatcctttaccaccaaataaaattctgattggtcaatgtgaatgtattcacttaacagttccacaaatttatttattaactccgaggcacatacatcgtcggtattttttatggcaaactttactcttccagcatccgtttctaaaaaaatattaacgagttccatttatatcatccaatattattgaaatgacgttgatggacagatgatacaaataagaaggtacggtacctttgtccaccatctcctccaattcatgctctattttgtcattaactttaatgtatgaaaacagtacgccacatgcttccatgacagtgtgtaacactttggatacaaaatgtttgacattagtataattgtccaagactgtcaatctataatagatagtagctataatatattctatgatggtattgaagaagatgacaaccttggcatattgatcatttaacacagacatggtatcaacagatagcttgaatgaaagagaatcagtaattggaataagcgtcttctcgatagagtgtccgtataccaacatgtctgatattttgatgtattccattaaattatttagttttttctttttattctcgttaaacagcatttctgtcaacggaccccaacatcgttgaccgattaagttttgattgatttttccgtgtaaggcgtatctagtcagatcgtatagcctatccaataatccatcgtctgtgtgtagatcacatcgtacactttttaattctctatagaagagcgacagacatctggagcaattacagacagcaatttctttattctctacagatgtaagatacttgaagacattcctatgatgatgcagaattttggataacacggtattgatggtatctgttaccataattcctttgatggctgatagtgtcagagcacaagatttccaatctttgacaatttttagcaccattatctttgttttgatatctatatcagacagcatggtgcgtctgacaacacagggattaagacggaaagatgaaatgattctctcaacatcttcaatagataccttgctattttttctggcattatctatatgtgcgagaatatcctctagagaatcagtatcctttttgatgatagtggatctcaatgacatgggacgtttaaaccttcttattctatcaccagattgcatggtgatttgtcttctttcttttatcataatgtaatctctaaattcatcggcaaattgtctatatctaaaatcataatatgagatgtttacctctacaaatatctgttcgtccaatgttagagtatttacatcagttttgtattccaaattaaacatggcaacggatttaattttatattcctctattaagtcctcgtcgataataacagaatgtagataatcatttaatccgtcgtacatggttggaagatgcttgttgacaaaatctttaattgtcttgatgaaggtgggactatatctaacatcttgattaataaaatttataacattgtccataggatactttgtaactagttttatacacatctcttcatcggtaagtttagacagaatatcgtgaacaggtggtatattatattcatcagatatacgaagaacaatgtccaaatctatattgtttaatatattatatagatgtagcgtagctcctacaggaatatctttaactaagtcaatgatttcatcaaccgttagatctattttaaagttaatcatataggcattgatttttaaaaggtatgtagccttgactacattctcattaattaaccattccaagtcattgtgtgtaagaagattatattctatcataagcttgactacatttggtcccgataccattaaagaattcttatgatataaggaaacagattttaggtactcatctactctacaagaattttggagagccttaacgatatcagtgacgtttattatttcaggaggaaagaatctaacattgagaatatcggaattaatagcttccagatacagtgattttggcaatagtccgtgtaatccataatccagtaacacgagctggtgcttgctagacaccttttcaatgtttaatttttttgaaataagctttgataaagccttcctcgcaaattccggatacatgaacatgtcggcgacatgattaagtattgttttttcattatttttatattttctcaacaagttctcaataccccaatagatgatagaatatcacccaatgcgtccatgttgtctatttccaacaggtcgctatatccaccaatagaagtttttccaaaaaagattctaggaacagttctaccaccagtaatttgttcaaaataatcccgcaattcattttcgggtttaaattctttaatatcgacaatttcatacgctcctcttttgaaactaaacttatttagaatatccagtgcatttctacaaaaaggacatgtatacttgacaaaaattgtcactttgttattggccaacctttgttgtacaaattcctcggccattttaatatttaagtgatataaaactatctcgacttatttaactctttagtcgagatatatggacgcagatagctatatgatagccaactacagaaggcaaacgctataaaaaacataattacgacgagcatatttataaatatttttattcagcattacttgatatagtaatattaggcacagtcaaacattcaaccactctcgatacattaactctctcattttctttaacaaattctgcaatatcttcgtaaaaagattcttgaaactttttagaatatctatcgactctagatgaaatagcgttcgtcaacatactatgttttgtatacataaaggcgcccattttaacagtttctagtgacaaaatgctagcgatcctaggatcctttagaatcacatagattgacgattcgtctctcttagtaactctagtaaaataatcatacaatctagtacgcgaaataatattatccttgacttgaggagatctaaacaatctagttttgagaacatcgataagttcatcgggaatgacatacatactatctttaatagaactcttttcatccagttgaatggattcgtccttaaccaactgattaatgagatcttctattttatcattttccagatgatatgtatgtccattaaagttaaattgtgtagcgcttctttttagtctagcagccaatactttaacatcactaatatcgatatacaaaggagatgatttatctatggcattaagaattcgtttttcgacatccgtcaaaaccaattcctttttgcctgtatcatccagttttccatcctttgtaaagaaattattttctactagactattaataagactgataaggattcctccataattgcacaatccaaactttttaacaaaactagactttacgagatctacaggaatgcgtacttcaggttttttagcttgtgattttttcttttgcggacattttctagtaaccaactcatctaccatttcattgattttagcagtgaaataagctttcaatgcacgggcactgatactattgaaaacgagttgatcttcaaattccgccatttaagttcaccaaacaacttttaaatacaaatatatcaatagtagtagaataagaactataaaaaaaataataattaaccaaccccaacaaccggtattattagttgatgtggtagttttctcatcacttagaacagatttaacaatttctataaagtctgtcaaatcatcttccggagaccccataaatacaccaaatatagcggcgtacaacttatccatttatacattgaatattggcttttctttatcgctatcttcatcatattcatcatcaatatcaacaagtcccagattacgagccagatcttcttctacattttcagtcattgatacacgttcactatctccagagagtccgataacgttagccaccacttctctatcaatgattagtttcttgagcgcgaaagtaatttttgtttccgttccggatctatagaagacgataggtgtgataattgccttggccaattgtctttctcttttactgagtgattctagttcaccttctatagatctgagaatggatgattctccagtcgaaacatattctaccatggatccgtttaatttgttgatgaagatggattcatccttaaatgttttctctgtaatagtttccaccgaaagactatgcaaagaatttggaatgcgttccttgtgcttaatgtttccatagacggcttctagaagttgatacaacataggactagccgcggtaacttttatttttagaaagtatccatcgcttctatcttgtttagatttatttttataaagtttagtctctccttccaacataataaaagtggaagtcatttgactagataaactatcagtaagttttatagagatagacgaacaattagcgtattgagaagcatttagtgtaacgtattcgatacattttgcattagatttactaatcgattttgcatactctataacacccgcacaagtctgtagagaatcgctagatgcagtaggtcttggtgaagtttcaactctcttcttgattaccttactcatgattaaacctaaataattgtactttgtaatataatgatatatattttcactttatctcatttgagaataaaaatgtttttgtttaaccactgcatgatgtacagatttcggaatcgcaaaccaccagtggttttattttatccttgtccaatgtgaattgaatgggagcggatgcgggtttcgtacgtagatagtacattcccgtttttagaccgagactccatccgtaaaaatgcatactcgttagtttggaataactcggatctgctatatggatattcatagattgactttgatcgatgaaggctcccctgtctgcagccatttttatgatcgtcttttgtggaatttcccaaatagttttataaactcgcttaatatcttctggaaggtttgtattctgaatggatccaccatctgccataatcctattcttgatctcatcattccataattttctctcggttaaaactctaaggagatgcggattaactacttgaaattctccagacaatactctccgagtgtaaatattactggtatacggttccaccgactcattatttcccaaaatttgagcagttgatgcagtcggcataggtgccaccaataaactatttctaagaccgtatgttctgattttatcttttagaggttcccaattccaaagatccgacggtacaacattccaaagatcatattgtagaataccgttactggcgtacgatcctacatatgtatcgtatggtccttccttctcagctagttcacaactcgcctctaatgcaccgtaataaatggtttcgaagatcttcttatttagatcttgtgcttccaggctatcaaatggataatttaagagaataaacgcgtccgctaatccttgaacaccaataccgataggtctatgtctcttattagagatttcagcttctggaataggataataattaatatctataattttattgagatttctgacaattactttgaccacatccttcagtttgagaaaatcaaatcgcccatctattacaaacatgttcaaggcaacagatgccagattacaaacggctacctcattagcatccgcatattgtattatctcagtgcaaagattactacacttgatagttcctaaattttgttgattactctttttgttacacgcatccttataaagaatgaatggagtaccagtttcaatctgagattctataatcgctttccagacgactcgagcctttattatagatttgtatctcctttctctttcgtatagtgtatacaatcgttcgaactcgtctccccaaacattgtccaatccaggacattcatccggacacatcaacgaccactctccgtcatccttcactcgtttcataaagagatcaggaatccaaagagctataaatagatctctggttctatgttcctcgtttcctgtattctttttaagatcgaggaacgccataatatcagaatgccacggttccaagtatatggccataactccaggccgtttgtttcctccctgatctatgtatctagcggtgttattataaactctcaacattggaataataccgtttgatataccattggtaccggagatatagcttccactggcacgaatattactaattgatagacctattccccctgccattttagagattaatgcgcatcgttttaacgtgtcatagataccctctatgctatcatcgatcatgttaagtagaaaacagctagacatttggtgacgactagttcccgcattaaataaggtaggagaagcgtgcgtaaaccatttttcagaaagtagattgtacgtctcaatagctgagtctatatcccattgatgaattcctactgcgacacgcattaacatgtgctgaggtctttcaacgatcttgttgtttattttcaacaagtaggatttttccaaagttttaaaaccaaaatagttgtatgaaaagtctcgttcgtaaataataaccgagttgagtttatccttatatttgttaactatatccatggtgatacttgaaataatcggagaatgtttcccatttttaggattaacatagttgaataaatcctccatcacttcactaaatagtttttttgtttccttgtgtagatttgatacggctattctggcggctagaatggcataatccggatgttgtgtagtacaagtggctgctatttcggctgccagagtgtccaattctaccgttgttactccattatatattccttgaataaccttcatagctattttaataggatctatatgatccgtgtttaagccataacataattttctaatacgagacgtgattttatcaaacatgacattttccttgtatccatttcgtttaatgacaaacatttttgttggtgtaataaaaaaattatttaacttttcattaatagggatttgacgtatgtagcgtacaaaatgattgttcctggtatatagataaagagtcctatatatttgaaaatcgttacggctcgattaaactttaatgattgcatagtgaatatatcattaggatttaactccttgactatcatggcggcgccagaaattaccatcaaaagcattaatacagttataccgatcgcagttagaacggttatagcatccaccatttatatctaaaaattagatcaaagaatatgtgacaaagtcctagttgtatactgagaattgacgaaacaatgtttcttacatatttttttcttattagtaaccgacttaatagtaggaactggaaaactagacttgattattctataagtatagatacccttccaaataatattctctttgataaaagttccagaaaatgtagaattttttaaaaagttatcttttgctattaccaagattgtgtttagacgcttattattaatatgagtgatgaaatccacaccgcctctagatatcgcctttatttccacattagatggtaaatccaatagtgaaactatctttttaggaatgtatggactcgcgtttagaggagtaaacgtcttaggcgtcggaaaggatgattcatcaaacgaataaacaatttcacaaatggatgttaatgtattagtaggaaattttttgacgctattggaattgaagattctaatggatgatgttctacctatttcatccgataacatgttaatttccgacaccaacggttttaatatttcgatgatatacggtagtctctctttcggacttatatagcttattccacaatacgagtcattatatactccaaaaaacaaaataactagtataaaatctgtatcgaatgggaaaaacgaaattatcgacataggtatagaatccggaacattgaacgtattaatacttaattctttttctgtggtaagtaccgataggttattgacattgtatggttttaaatattctataacttgagacttgatagatattagtgatgaattgaaaattatttttatcaccacgtgtgtttcaggatcatcgtcgacgcccgtcaaccaaccgaacggagtaaaataaatatcattaatatatgctctagatattagtatttttatcaatcctttgattatcatcttctcgtaggcgaatgattccatgatcaagagtgatttaagaacatcctccggagtattaatgggcttagtaaacagtccatcgttgcaataataaaagttatccaagttaaaggatattatgcattcgtttaaagatatcacctcatctgacggagacaattttttggtaggttttagagactttgaagctacttgtttaacaaagttattcatcgtcgtctactattctatttaattttgtagttaatttatcacatatcacattaattgactttttggtccacttttccatacgtttatattcttttaatcctgcgttatccgtttccgttatatccagggatagatcttgcaagttaaatagaatgctcttaaataatgtcattttcttatccgctaaaaatttaaagaatgtataaacctttttcagagatttgaaactcttaggtggtgtcctagtacacaatatcataaacaaactaataaacattccacattcagattccaacagctgattaacttccacattaatacagcctattttcgctccaaatgtacattcgaaaaatctgaataaaacatcgatgtcacaatttgtattatccaatacagaatgtttgtgattcgtgttaaaaccatcggagaaggaatagaaataaaaattattatagtggtggaattcagttggaatattgcctccggagtcataaaaggatactaaacattgttttttatcataaattacacatttccaatgagacaaataacaaaatccaaacattacaaatctagaggtagaacttttaattttgtctttaagtatatacgataagatatgtttattcataaacgcgtcaaatttttcatgaatcgctaaggagtttaagaatctcatgtcaaattgtcctatataatccacttcggatccataagcaaactgagagactaagttcttaatacttcgattgctcatccaggctcctctctcaggctctattttcatcttgacgacctttggattttcaccagtatgtattcctttacgtgataaatcatcgattttcaaatccatttgtgagaagtctatcgccttagatactttttcccgtagtcgaggtttaaaaaaatacgctaacggtatactagtaggtaactcaaagacatcatatatagaatggtaacgcgtctttaactcgtcggttaactctttcttttgatcgagttcgtcgctactattgggtctgctcaggtgccccgactctactagttccaacatcataccgataggaatacaagacactttgccggcggttgtagatttatcatatttttccactacatatccgttacaatttgttaaaaatttagatacatctatattgctacataatccagctagtgaatatatatgacataataaattggtaaatcctagttctggtattttactaattactaaatctgtatatctttccatttatcatggaaaagaatttaccagatatcttcttttttccaaactgcgttaatgtattctcttacaaatattcacaagatgaattcagtaatatgagtaaaacggaacgtgatagtttctcattggccgtgtttccagttataaaacatagatggcataacgcacacgttgtaaaacataaaggaatatacaaagttagtacagaagcacgtggaaaaaaagtatctcctccatcactaggaaaacccgcacacataaacctaaccgcgaagcaatatatatacagtgaacacacaataagctttgaatgttatagttttctaaaatgtataacaaatacagaaatcaattcgttcgatgagtatatattaagaggactattagaagctggtaatagtttacagatattttccaattccgtaggtaaacgaacagatactataggtgtactagggaataagtatccatttagcaaaattccattggcctcattaactcctaaagcacaacgagagatattttcagcgtggatttctcatagacctgtagttttaactggaggaactggagtgggtaagacgtcacaggtacccaagttattgctttggtttaattatttatttggtggattctctactctagataaaatcactgactttcacgaaagaccagtcattctatctcttcctaggatagctttagttagattgcatagcaataccattttaaaatcattgggatttaaggtactagatggatctcctatttctttacggtacggatctataccggaagaattaataaacaaacaaccaaaaaaatatggaattgtattttctacccataagttatctctaacaaaactatttagttatggcactcttattatagacgaagttcatgagcatgatcaaataggagatattattatagcagtagcgagaaagcatcatacgaaaatagattctatgtttttaatgactgccacgttagaggatgacagggaacggctaaaagtatttttacctaatcccgcatttatacatattcctggagatacactgtttaaaattagcgaggtatttattcataataagataaatccatcttccagaatggcatacatagaagaagaaaagagaaatttagttactgctatacagatgtatactcctcctgatggatcatccggtatagtctttgtggcatccgttgcacagtgtcacgaatataaatcatatttagaaaaaagattaccgtatgatatgtatattattcatggtaaggtcttagatatagacgaaatattagaaaaagtgtattcatcacctaatgtatcgataattatttctactccttatttggaatccagcgttactatacgcaatgttacacacatttatgatatgggtagagtttttgtccccgctccttttggaggatcgcaacaatttatttctaaatctatgagagatcaacgaaaaggaagagtaggaagagttaatcctggtacatacgtctatttctatgatctgtcttatatgaagtctatacagcgaatagattcagaatttctacataattatatattgtacgctaataagtttaatctaacactccccgaagatttgtttataatccctacaaatttggatattctatggcgtacaaaggaatatatagactcgttcgatattagtacagaaacatggaataaattattatccaattattatatgaagatgatagagtatgctaaactttatgtactaagtcctattctcgctgaggagttggataactttgagaggacgggagaattaactagtattgtacgagaagccattttatctctaaatttacaaattaagattttaaattttaaacataaagatgatgatacgtatatacacttttgtaaaatattattcggtgtctataacggaacaaacgctactatatattatcatagacctctaacgggatatatgaatatgatttcagatactatatttgttcctgtagataataactaaaaatcaaactctaatgaccacatctttttttagagatgaaaaattttccacatctccttttgtagacacgactaaacattttgcagaaaaaagtttattagtgtttagataatcgtatacttcatcagtgtagatagtaaatgtgaacagataaaaggtattcttgctcaatagattggtaaattccatagaatatattaatcctttcttcttgagatcccacatcatttcaaccagagacgttttatccaatgatttacctcgtactataccacatacaaaactagattttgcagtgacgtcgtacctggtattcctaccaaacaaaattttacttttagttcttttagaaaattctaaggtagaatctctatttgccaatatgtcatctatggaattaccactagcaaaaaatgatagaaatatatattgatacatcgcagctggttttgatctactatactttaaaaacgaatcagattccataattgcctgtatatcatcagctgaaaaactatgttttacacgtattccttcggcatttctttttaatgatatatcttgtttagacaatgataaagttatcatgtccatgagagacgcgtctccgtatcgtataaatatttcattagatgttagacgcttcattaggggtatacttctataaggtttcttaatcagtccatcattggttgcgtcaagaactactatcggatgttgttgggtatctctagtgttacacatggccttactaaagtttgggtaaataactatgatatctctattaattatagatgcatatatttcattcgtcaaggatattagtatcgacttgctatcgtcattaatacgtgtaatgtaatcatataaatcatgcgatagccaaggaaaatttaaatagatgttcatcatataatcgtcgctataattcatattaatacgttgacattgactaatttgtaatatagcctcgccacgaagaaagctctcgtattcagtttcatcgataaaggataccgttaaatataactggttgccgatagtctcatagtctattaagtggtaagtttcgtacaaatacagaatccctaaaatattatctaatgttggattaatctttaccataactgtataaaatggagacggagtcataactattttaccgtttgtacttactggaatagatgaaggaataatctccggacatgctggtaaagacccaaatgtctgtttgaagaaatccaatgttccaggtcctaatctcttaacaaaaattacgatattcgatcccgatatcctttgcattctatttaccagcatatcacgaactatattaagattatctatcatgtctattctcccaccgttatataaatcgcctccgctaagaaacgttagtatatccatacaatggaatacttcatttctaaaatagtattcgttttctaattctttaatgtgaaatcgtatactagaaagggaaaaattatctttgagttttccgttagaaaagaaccacgaaactaatgttctgattgcgtccgattccgttgctgaattaatggatttacaccaaaaactcatataacttctagatgtagaagcattcgctaaaaaattagtagaatcaaaggatataagtagatgttccaacaagtgagcaattcccaagatttcatctatatcattctcgaatccgaaattagaaattcccaagtagatatcctttttcatccgatcgttgatgaaaatacgaactttattcggtaagacaatcatttactaaggagtaaaataggaagtaatgttcgtatgtcgttatcatcgtataaattaaaggtgtgttttttaccattaagtgacattataattttaccaatattggaattataatataggtgtatttgcgcactcgcgacggttgatgcatcggtaaatatagctgtatctaatgttctagtcggtatttcatcatttcgctgtctaataatagcgttttctctatctgtttccattacagctgcctgaagtttattggtcggataatatgtaaaataataagaaatacatacgaataacaaaaataaaataagatataataaagatgccatttagagatctaattttgtttaacttgtccaaattcctacttacagaagatgaggaatcgttggagatagtgtcttccttatgtagaggatttgaaatatcttataatgacttgataacttactttccagataggaaataccataaatatatttataaagtatttgaacatgtagatttatcggaggaattaagtatggaattccatgatacaactctgagagatttagtctatcttagattgtacaagtattccaagtgtatacggccgtgttataaattaggagataatctaaaaggcatagttgttataaaggacaggaatatttatattagggaagcaaatgatgacttgatagaatatctcctcaaggaatacactcctcagatttatacatattctaatgagcgcgtccccataactggttcaaaattaattctttgtggattttctcaagttacatttatggcgtatacaacgtcgcatataacaacaaataaaaaggtagatgttctcgtttccaaaaaatgtatagatgaactagtcgatccaataaattatcaaatacttcaaaatttatttgataaaggaagcggaacaataaacaaaatactcaggaagatattttattcggtaacaggtggccaaactccataggtagctttttctatttcggattttagaatttccaaattcaccagcgatttatcggttttggtgaaatccaaggatttattaatgtccacaaatgccatttgttttgtctgtggattgtatttgaaaatggaaacgatgtagttagatagatgcgctgcgaagtttcctattagggttccgcgcttcacgtcacccagcatacttgaatcaccatcctttaaaaaaaatgataagatatcaacatggagtatatcatactcgaattttaattcttctactgactcactgacattttcacaaatactacaatacggtttaccgaaaataatcagtacgttcttcatttatgggtatcaaaaacttaaaatcgttactgctggaaaataaatcactgacgatattagatgataatttatacaaagtatacaatggaatatttgtggatacaatgagtatttatatagccgtcgccaattgtgtcagaaacttagaagagttaactacggtattcataaaatacgtaaacggatgggtaaaaaagggagggcatgtaaccctttttatcgatagaggaagtataaaaattaaacaagacgttagagacaagagacgtaaatattctaaattaaccaaggacagaaaaatgttagaattagaaaagtgtacatccgaaatacaaaatgttaccggatttatggaagaagaaataaaggcagaaatgcaattaaaaatcgataaactcacatttcaaatatatttatctgattctgataacataaaaatatcattgaatgagatactaacacatttcaacaataatgagaatgttacattattttattgtgatgaacgagacgcagaattcgttatgtgtctcgaggctaaaacacatttctctaccacaggagaatggccgttgataataagtaccgatcaggatactatgctatttgcatctgctgataatcatcctaagatgataaaaaacttaactcaactgtttaaatttgttccctcggcagaggataactatttagcaaaattaacggcgttagtgaatggatgtgatttctttcctggactctatggggcatctataacacccaccaacttaaacaaaatacaattgtttagtgattttacaatcgataatatagtcactagtttggcaattaaaaattattatagaaagactaactctaccgtagacgtgcgtaatattgttacgtttataaacgattacgctaatttagacgatgtctactcgtatattcctccttgtcaatgcactgttcaagaatttatattttccgcattagatgaaaaatggaatgaatttaaatcatcttatttagaaagcgtgccgttaccctgccaattaatgtacgcgttagaaccacgcaaggagattgatgtttcagaagttaaaactttatcatcttatatagatttcgaaaatactaaatcagatatcgatgttataaaatctatatcctcgatcttcggatattctaacgaaaactgtaacacgatagtattcggcatctataaggataatttactactgagtataaataattcattttactttaacgatagtctgttaataaccaatactaaaagtgataatataataaatataggttactagattaaaaatggtgttccaactcgtgtgctctacatgcggtaaagatatttctcacgaacgatataaattgattatacgaaaaaaatcattaaaggatgtactcgtcagtgtaaagaacgaatgttgtaggttaaaattatctacacaaatagaacctcaacgtaacttaacagtgcaacctctattggatataaactaatatggatccggttaattttatcaagacatatgcgcctagaggttctattatttttattaattataccatgtcattaacaagtcatttgaatccatcgatagaaaaacatgtgggtatttattatggtacgttattatcggaacacttggtagttgaatctacctatagaaaaggagttcgaatagtcccattggatagtttttttgaaggatatcttagtgcaaaagtatacatgttagagaatattcaagttatgaaaatagcagctgatacgtcattaactttattgggtattccgtatggatttggtcatgatagaatgtattgttttaaattggtagctgactgttataaaaatgccggtattgatacatcgtctaaacgaatattgggcaaagatatttttctgagccaaaacttcacagacgataatagatggataaagatatatgattctaataatttaacattttggcaaattgattaccttaaagggtgagttaatatgcataactactcctccgttgttttttccctcgttctttttcttaacgttgtttgccatcactctcataatgtaaagatattctaaaatggtaaacttttgcatatcggacgcagaaattggtataaatgttgtaattgtattatttcccgtcaatggactagtcacagctccatcagttttatatcctttagagtatttctcactcgtgtctaacattctagagcattccatgatctgtttatcgttgatattggccggaaagatagattttttattttttattatattactattggcaattgtagatataacttctggtaaatatttttctaccttttcaatctcttctattttcaagccggctatatattctgctatattgttgctagtatcaataccttttctggctaagaagtcatatgtggtattcactatatcagttttaactggtagttccattagcctttccacttctgcagaataatcagaaattggttctttaccagaaaatccagctactataataggctcaccgatgatcattggcaaaatcctatattgtaccagattaatgagagcatatttcatttccaataattctgctagttcttgagacattgatttatttgatgaatctagttggttctctagatactctaccatttctgccgcatacaataacttgttagataaaatcagggttatcaaagtgtttagcgtggctagaatagtgggcttgcatgtattaaagaatgcggtagtatgagtaaaccgttttaacgaattatatagtctccagaaatctgtggcgttacatacatgagccgaatgacatcgaagattgtccaatatttttaatagctgctctttgtccattatttctatatttgactcgcaacaattgtagataccattaatcaccgattcctttttcgatgccggacaatagcacaattgtttagctttggactctatgtattcagaattaatagatatatctctcaatacagattgcactatacattttgaaactatgtcaaaaattgtagaacgacgctgttctgcagccatttaactttaaataatttacaaaaatttaaaatgagcatccgtataaaaatcgataaactgcgccaaattgtggcatatttttcagagttcagtgaagaagtgtctataaatgtagactcgacggatgagttaatgtatatttttgccgccttgggcggatctgtaaacatttgggcaattatacctctaagtgcatcagtgttttaccgaggagccgaaaatattgtgtttaatcttcctgtgtccaaggtaaaatcgtgtttgtgtagttttcacaatgatgccatcatagatatagaacctgatctggaaaataatctagtaaaactttctagttatcatgtagtaagtgtcgattgtaacaaggaactgatgcctattaggacagatactactatttgtctaagtatagatcaaaagaaatcttacgtgtttaattttcacaagtatgaagaaaaatgttgtggtagaaccgtcattcatctagaatggttgttgggctttatcaagtgtattagtcagcatcagcatctggctattatgtttaaagatgacaatattattatgaagactcctggtaatactgatgcgttttccagggaatattctatgactgaatgttctcaagaactacaaaagttttctttcaaaatagctatctcgtctctcaacaaactacgaggattcaaaaagagagtcaatgtttttgaaactagaatcgtaatggataatgacgataacattttaggaatgttgttttcggatagagttcaatcctttaagatcaacatctttatggcgtttttagattaatactttcaatgagataaatatgggtggcggagtaagtgttgagctccctaaacgggatccgcctccgggagtacccactgatgagatgttattaaacgtggataaaatgcatgacgtgatagctcccgctaagcttttagaatatgtgcatataggaccactagcaaaagataaagaggataaagtaaagaaaagatatccagagtttagattagtcaacacaggacccggtggtctttcggcattgttaagacaatcgtataatggaaccgcacccaattgctgtcgcacttttaatcgtactcattattggaagaaggatggaaagatatcagataagtatgaagagggtgcagtattagaatcgtgttggccagacgttcacgacactggaaaatgcgatgttgatttattcgactggtgtcagggggatacgttcgatagaaacatatgccatcagtggatcggttcagcctttaataggagtaatagaactgtagagggtcaacaatcgttaataaatctgtataataagatgcaaacattatgtagtaaagatgctagtgtaccaatatgcgaatcatttttgcattatttacgcgcacacaatacagaagatagcaaagagatgatcgattatattctaagacaacagtctgcggactttaaacagaaatatatgagatgtagttatcccactagagataagttagaagagtcattaaaatatgcggaacctcgagaatgttgggatccagagtgttcgaatgccaatgttaatttcttactaacacgtaattataataatttaggactttgcaatattgtacgatgtaataccagcgtgaacaacttacagatggataaaacttcctcattaagattgtcatgtggattaagcaatagtgatagattttctactgttcccgtcaatagagcaaaagtagttcaacataatattaaacactcgttcgacctaaaattgcatttgatcagtttattatctctcttggtaatatggatactaattgtagctatttaaatgggtgccgcggcaagcatacagacgacggtgaatacactcagcgaacgtatctcgtctaaattagaacaagaagcgaacgctagtgctcaaacaaaatgtgatatagaaatcggaaatttttatatccgacaaaaccatggatgtaacctcactgttaaaaatatgtgctctgcggacgcggatgctcagttggatgctgtgttatcagccgctacagaaacatatagtggattaacaccggaacaaaaagcatacgtgccagctatgtttactgctgcgttaaacattcagacgagtgtaaacactgttgttagagattttgaaaattatgtgaaacagacttgtaattctagcgcggtcgtcgataacaaattaaagatacaaaacgtaatcatagatgaatgttacggagccccaggatctccaacaaatttggaatttattaatacaggatctagcaaaggaaattgtgccattaaagcgttgatgcaattgacgactaaggccactactcaaatagcacctagacaagttgctggtacaggagttcagttttatatgattgttatcggtgttataatattggcagcgttgtttatgtactatgccaagcgtatgttgttcacatccaccaatgataaaatcaaacttattttagccaataaggaaaacgtccattggactacttacatggacacattctttagaacttctccgatggttattgctaccacggatatgcaaaactgaaaatatattgataatattttaatagattaacatggaagttatcgctgatcgtctagacgatatagtgaaacaaaatatagcggatgaaaaatttgtagattttgttatacacggtctagagcatcaatgtcctgctatacttcgaccattaattaggttgtttattgatatactattatttgttatagtaatttatatttttacggtacgtctagtaagtagaaattatcaaatgttgttggtggtgctagtcatcacattaactattttttattactttatactataatagtactagactgacttctaacaaacatctcacctgccataaataaatgcttgatattaaagtcttctatttctaacactattccatctgtggaaaataatactctgacattatcgctaattgacacatcggtgagtgatatgcctataaagtaataatcttctttgggcacatataccagtgtaccaggttctaacaacctatttactggtgctcctgtagcatactttttctttaccttgagaatatccatcgtttgcttggtcaatagcgatatgtgattttttatcaaccactcaaaaaagtaattggagtgttcatatcctctacgggctattgtctcatggccgtgtatgaaatttaagtaacacgactgtggtagatttgttctatagagccgattgccgcaaatagatagaactaccaatatgtctgtacaaatgttaaacattaattgattaacagaaaaaacaatgttcgttctgggaatagaaaccagatcaaaacaaaattcgttagaatatatgccacgtttatacatggaatataaaataactacagtttgaaaaataacagtatcatttaaacatttaacttgcggggttaatctcacaactttactgtttttgaactgttcaaaatatagcatcgatccgtgagaaatacgtttagccgcctttaatagaggaaatcccaccgcctttctggatctcaccaacgacgatagttctgaccagcaactcatttcttcatcatccacctgttttaacatataataggcaggagatagatatccgtcattgcaatattccttctcgtaggcacacaatctaatattgataaaatctccattctcttctctgcatttattatcttgtctcggtggctgattaggctgtggtcttggtttaggccttggtctatcgttgttgaatctattttggtcattaaatctttcatttcttcctggtatatttctatcacctcgtttggttggatttttgtctatattatcgtttgtaacatcggtacgggtattcatttatcacaaaaaaaacttctctaaatgagtctactgctagaaaacctcatcgaagaagataccatattttttgcaggaagtatatctgagtatgatgatttacaaatggttattgccggcgcaaaatccaaatttccaagatctatgctttctatttttaatatagtacctagaacgatgtcaaaatatgagttggagttgattcataacgaaaatatcacaggagcaatgtttaccacaatgtataatataagaaacaatttgggtctaggagatgataaactaactattgaagccattgaaaactatttcttggatcctaacaatgaagttatgcctcttattattaataatacggatatgactgccgtcattcctaaaaaaagtggtaggagaaagaataagaacatggttatcttccgtcaaggatcatcacctatcttgtgcattttcgaaactcgtaaaaagattaatatttataaagaaaatatggaatccgcgtcgactgagtatacacctatcggagacaacaaggctttgatatctaaatatgcgggaattaatgtcctgaatgtgtattctccttccacatccataagattgaatgccatttacggattcaccaataaaaataaactagagaaacttagtactaataaggaactagaatcgtatagttctagccctcttcaagaacccattaggttaaatgattttctgggactattggaatgtgttaaaaagaatattcctctaacagatattccgacaaaggattgattactataaatggagaatgttcctaatgtatactttaatcctgtgtttatagagcccacgtttaaacattctttattaagtgtttataaacacagattaatagttttatttgaagtattcgttgtattcattctaatatatgtattttttagatctgaattaaatatgttcttcatgcctaaacgaaaaatacccgatcctattgatagattacgacgtgctaatctagcgtgtgaagacgataaattaatgatctatggattaccatggatgacaactcaaacatctgcgttatcaataaatagtaaaccgatagtgtataaagattgtgcaaagcttttgcgatcaataaatggatcacaaccagtatctcttaacgatgttcttcgcagatgatgattcattttttaagtatttggctagtcaagatgatgaatcttcattatctgatatattgcaaatcactcaatatctagactttctgttattattattgatccaatcaaaaaataaattagaagctgtgggtcattgttatgaatctctttcagaggaatacagacaattgacaaaattcacagactttcaagattttaaaaaactgtttaacaaggtccctattgttacagatggaagggtcaaacttaataaaggatatttgttcgactttgtgattagtttgatgcgattcaaaaaagaatcctctctagctaccaccgcaatagatcctgttagatacatagatcctcgtcgcaatatcgcattttctaacgtgatggatatattaaagtcgaataaagtgaacaataattaattctttattgtcatcatgaacggcggacatattcagttgataatcggccccatgttttcaggtaaaagtacagaattaattagacgagttagacgttatcaaatagctcaatataaatgcgtgactataaaatattctaacgataatagatacggaacgggactatggacgcatgataagaataattttgaagcattggaagcaactaaactatgtgatgtcttggaatcaattacagatttctccgtgataggtatcgatgaaggacagttctttccagacattgttgaattagatcgataaaaattaattaattacccgggtaccaggcctagatctgtcgagatccggtggtggtgcaaatcaaagaactgctcctcagtggatgttgcctttacttctaggcctgtacggaagtgttacttctgctctaaaagctgctgcagggggggggggggggtgggggggccggttagggccgccatcccctcagagcgtcgggatatcgggtggcggctcgggacggaggacgcgctagtgttcttctgtgtggcagttcagaatgatggatcaagctagatcagcattctctaacttgtttggtggagaaccattgtcatatacccggttcagcctggctcggcaagtagatggcgataacagtcatgtggagatgaaacttgctgtagatgaagaagaaaatgctgacaataacacaaaggccaatgtcacaaaaccaaaaaggtgtagtggaagtatctgctatgggactattgctgtgatcgtctttttcttgattggatttatgattggctacttgggctattgtaaaggggtagaaccaaaaactgagtgtgagagactggcaggaaccgagtctccagtgagggaggagccaggagaggacttccctgcagcacgtcgcttatattgggatgacctgaagagaaagttgtcggagaaactggacagcacagacttcaccagcaccatcaagctgctgaatgaaaattcatatgtccctcgtgaggctggatctcaaaaagatgaaaatcttgcgttgtatgttgaaaatcaatttcgtgaatttaaactcagcaaagtctggcgtgatcaacattttgttaagattcaggtcaaagacagcgctcaaaactcggtgatcatagttgataagaacggtagacttgtttacctggtggagaatcctgggggttatgtggcgtatagtaaggctgcaacagttactggtaaactggtccatgctaattttggtactaaaaaagattttgaggatttatacactcctgtgaatggatctatagtgattgtcagagcagggaaaatcacctttgcagaaaaggttgcaaatgctgaaagcttaaatgcaattggtgtgttgatatacatggaccagactaaatttcccattgttaacgcagaactttcattctttggacatgctcatctggggacaggtgacccttacacacctggattcccttccttcaatcacactcagtttccaccatctcggtcatcaggattgcctaatatacctgtccagacaatctccagagctgctgcagaaaagctgtttgggaatatggaaggagactgtccctctgactggaaaacagactctacatgtaggatggtaacctcagaaagcaagaatgtgaagctcactgtgagcaatgtgctgaaagagataaaaattcttaacatctttggagttattaaaggctttgtagaaccagatcactatgttgtagttggggcccagagagatgcatggggccctggagctgcaaaatccggtgtaggcacagctctcctattgaaacttgcccagatgttctcagatatggtcttaaaagatgggtttcagcccagcagaagcattatctttgccagttggagtgctggagactttggatcggttggtgccactgaatggctagagggatacctttcgtccctgcatttaaaggctttcacttatattaatctggataaagcggttcttggtaccagcaacttcaaggtttctgccagcccactgttgtatacgcttattgagaaaacaatgcaaaatgtgaagcatccggttactgggcaatttctatatcaggacagcaactgggccagcaaagttgagaaactcactttagacaatgctgctttccctttccttgcatattctggaatcccagcagtttctttctgtttttgcgaggacacagattatccttatttgggtaccaccatggacacctataaggaactgattgagaggattcctgagttgaacaaagtggcacgagcagctgcagaggtcgctggtcagttcgtgattaaactaacccatgatgttgaattgaacctggactatgagaggtacaacagccaactgctttcatttgtgagggatctgaaccaatacagagcagacataaaggaaatgggcctgagtttacagtggctgtattctgctcgtggagacttcttccgtgctacttccagactaacaacagatttcgggaatgctgagaaaacagacagatttgtcatgaagaaactcaatgatcgtgtcatgagagtggagtatcacttcctctctccctacgtatctccaaaagagtctcctttccgacatgtcttctggggctccggctctcacacgctgccagctttactggagaacttgaaactgcgtaaacaaaataacggtgcttttaatgaaacgctgttcagaaaccagttggctctagctacttggactattcagggagctgcaaatgccctctctggtgacgtttgggacattgacaatgagttttaaatgtgatacccatagcttccatgagaacagcagggtagtctggtttctagacttgtgctgatcgtgctaaattttcagtagggctacaaaacctgatgttaaaattccatcccatcatcttggtactactagatgtctttaggcagcagcttttaatacagggtagataacctgtacttcaagttaaagtgaataaccacttaaaaaatgtccatgatggaatattcccctatctctagaattttaagtgctttgtaatgggaactgcctctttcctgttgttgttaatgaaaatgtcagaaaccagttatgtgaatgatctctctgaatcctaagggctggtctctgctgaaggttgtaagtggtcgcttactttgagtgatcctccaacttcatttgatgctaaataggagataccaggttgaaagaccttctccaaatgagatctaagcctttccataaggaatgtagctggtttcctcattcctgaaagaaacagttaactttcagaagagatgggcttgttttcttgccaatgaggtctgaaatggaggtccttctgctggataaaatgaggttcaactgttgattgcaggaataaggccttaatatgttaacctcagtgtcatttatgaaaagaggggaccagaagccaaagacttagtatattttcttttcctctgtcccttcccccataagcctccatttagttctttgttatttttgtttcttccaaagcacattgaaagagaaccagtttcaggtgtttagttgcagactcagtttgtcagactttaaagaataatatgctgccaaattttggccaaagtgttaatcttaggggagagctttctgtccttttggcactgagatatttattgtttatttatcagtgacagagttcactataaatggtgtttttttaatagaatataattatcggaagcagtgccttccataattatgacagttatactgtcggttttttttaaataaaagcagcatctgctaataaaacccaacagatactggaagttttgcatttatggtcaacacttaagggttttagaaaacagccgtcagccaaatgtaattgaataaagttgaagctaagatttagagatgaattaaatttaattaggggttgctaagaagcgagcactgaccagataagaatgctggttttcctaaatgcagtgaattgtgaccaagttataaatcaatgtcacttaaaggctgtggtagtactcctgcaaaattttatagctcagtttatccaaggtgtaactctaattcccattttgcaaaatttccagtacctttgtcacaatcctaacacattatcgggagcagtatcttccataatgtataaagaacaaggtagtttttacctaccacagtgtctgtatcggagacagtgatctccatatgttacactaagggtgtaagtaattatcgggaacagtgtttcccataattttcttcatgcaatgacatcttcaaagcttgaagatcgttagtatctaacatgtatcccaactcctataattccctatcttttagttttagttgcagaaacattttgtggtcattaagcattgggtgggtaaattcaaccactgtaaaatgaaattactacaaaatttgaaatttagcttgggtttttgttacctttatggtttctccaggtcctctacttaatgagatagtagcatacatttataatgtttgctattgacaagtcattttaactttatcacattatttgcatgttacctcctataaacttagtgcggacaagttttaatccagaattgaccttttgacttaaagcagagggactttgtatagaaggtttgggggctgtggggaaggagagtcccctgaaggtctgacacgtctgcctacccattcgtggtgatcaattaaatgtaggtatgaataagttcgaagctccgtgagtgaaccatcattataaacgtgatgatcagctgtttgtcatagggcagttggaaacggcctcctagggaaaagttcatagggtctcttcaggttcttagtgtcacttacctagatttacagcctcacttgaatgtgtcactactcacagtctctttaatcttcagttttatctttaatctcctcttttatcttggactgacatttagcgtagctaagtgaaaaggtcatagctgagattcctggttcgggtgttacgcacacgtacttaaatgaaagcatgtggcatgttcatcgtataacacaatatgaatacagggcatgcattttgcagcagtgagtctcttcagaaaacccttttctacagttagggttgagttacttcctatcaagccagtacgtgctaacaggctcaatattcctgaatgaaatatcagactagtgacaagctcctggtcttgagatgtcttctcgttaaggagatgggccttttggaggtaaaggataaaatgaatgagttctgtcatgattcactattctagaacttgcatgacctttactgtgttagctctttgaatgttcttgaaattttagactttctttgtaaacaaatgatatgtccttatcattgtataaaagctgttatgtgcaacagtgtggagattccttgtctgatttaataaaatacttaaacactgaaaaaaaaaaaaaaaaaaaaaaaaaaaaaaaaaaaaaaaaaaaaaaaaaaaaaaaaaaaaaaaaaaaaaaaaaaaaaaaaagtaccttctgaggcggaaagaaccagccggatctcgacttcgagcttatttatattccaaaaaaaaaaaataaaatttcaatttttaagctttcactaattccaaacccacccgctttttatagtaagtttttcacccataaataataaatacaataattaatttctcgtaaaagtagaaaatatattctaatttattgcacggtaaggaagtagatcataactcgagcatgggagatcccgtcgttttacaacgtcgtgactgggaaaaccctggcgttacccaacttaatcgccttgcagcacatccccctttcgccagctggcgtaatagcgaagaggcccgcaccgatcgcccttcccaacagttgcgcagcctgaatggcgaatggcgctttgcctggtttccggcaccagaagcggtgccggaaagctggctggagtgcgatcttcctgaggccgatactgtcgtcgtcccctcaaactggcagatgcacggttacgatgcgcccatctacaccaacgtgacctatcccattacggtcaatccgccgtttgttcccacggagaatccgacgggttgttactcgctcacatttaatgttgatgaaagctggctacaggaaggccagacgcgaattatttttgatggcgttaactcggcgtttcatctgtggtgcaacgggcgctgggtcggttacggccaggacagtcgtttgccgtctgaatttgacctgagcgcatttttacgcgccggagaaaaccgcctcgcggtgatggtgctgcgctggagtgacggcagttatctggaagatcaggatatgtggcggatgagcggcattttccgtgacgtctcgttgctgcataaaccgactacacaaatcagcgatttccatgttgccactcgctttaatgatgatttcagccgcgctgtactggaggctgaagttcagatgtgcggcgagttgcgtgactacctacgggtaacagtttctttatggcagggtgaaacgcaggtcgccagcggcaccgcgcctttcggcggtgaaattatcgatgagcgtggtggttatgccgatcgcgtcacactacgtctgaacgtcgaaaacccgaaactgtggagcgccgaaatcccgaatctctatcgtgcggtggttgaactgcacaccgccgacggcacgctgattgaagcagaagcctgcgatgtcggtttccgcgaggtgcggattgaaaatggtctgctgctgctgaacggcaagccgttgctgattcgaggcgttaaccgtcacgagcatcatcctctgcatggtcaggtcatggatgagcagacgatggtgcaggatatcctgctgatgaagcagaacaactttaacgccgtgcgctgttcgcattatccgaaccatccgctgtggtacacgctgtgcgaccgctacggcctgtatgtggtggatgaagccaatattgaaacccacggcatggtgccaatgaatcgtctgaccgatgatccgcgctggctaccggcgatgagcgaacgcgtaacgcgaatggtgcagcgcgatcgtaatcacccgagtgtgatcatctggtcgctggggaatgaatcaggccacggcgctaatcacgacgcgctgtatcgctggatcaaatctgtcgatccttcccgcccggtgcagtatgaaggcggcggagccgacaccacggccaccgatattatttgcccgatgtacgcgcgcgtggatgaagaccagcccttcccggctgtgccgaaatggtccatcaaaaaatggctttcgctacctggagagacgcgcccgctgatcctttgcgaatacgcccacgcgatgggtaacagtcttggcggtttcgctaaatactggcaggcgtttcgtcagtatccccgtttacagggcggcttcgtctgggactgggtggatcagtcgctgattaaatatgatgaaaacggcaacccgtggtcggcttacggcggtgattttggcgatacgccgaacgatcgccagttctgtatgaacggtctggtctttgccgaccgcacgccgcatccagcgctgacggaagcaaaacaccagcagcagtttttccagttccgtttatccgggcaaaccatcgaagtgaccagcgaatacctgttccgtcatagcgataacgagctcctgcactggatggtggcgctggatggtaagccgctggcaagcggtgaagtgcctctggatgtcgctccacaaggtaaacagttgattgaactgcctgaactaccgcagccggagagcgccgggcaactctggctcacagtacgcgtagtgcaaccgaacgcgaccgcatggtcagaagccgggcacatcagcgcctggcagcagtggcgtctggcggaaaacctcagtgtgacgctccccgccgcgtcccacgccatcccgcatctgaccaccagcgaaatggatttttgcatcgagctgggtaataagcgttggcaatttaaccgccagtcaggctttctttcacagatgtggattggcgataaaaaacaactgctgacgccgctgcgcgatcagttcacccgtgcaccgctggataacgacattggcgtaagtgaagcgacccgcattgaccctaacgcctgggtcgaacgctggaaggcggcgggccattaccaggccgaagcagcgttgttgcagtgcacggcagatacacttgctgatgcggtgctgattacgaccgctcacgcgtggcagcatcaggggaaaaccttatttatcagccggaaaacctaccggattgatggtagtggtcaaatggcgattaccgttgatgttgaagtggcgagcgatacaccgcatccggcgcggattggcctgaactgccagctggcgcaggtagcagagcgggtaaactggctcggattagggccgcaagaaaactatcccgaccgccttactgccgcctgttttgaccgctgggatctgccattgtcagacatgtataccccgtacgtcttcccgagcgaaaacggtctgcgctgcgggacgcgcgaattgaattatggcccacaccagtggcgcggcgacttccagttcaacatcagccgctacagtcaacagcaactgatggaaaccagccatcgccatctgctgcacgcggaagaaggcacatggctgaatatcgacggtttccatatggggattggtggcgacgactcctggagcccgtcagtatcggcggaattccagctgagcgccggtcgctaccattaccagttggtctggtgtcaaaaataataataaccgggcaggggggatccaattctgtgagcgtatggcaaacgaaggaaaaatagttatagtagccgcactcgatgggacatttcaacgtaaaccgtttaataatattttgaatcttattccattatctgaaatggtggtaaaactaactgctgtgtgtatgaaatgctttaaggaggcttccttttctaaacgattgggtgaggaaaccgagatagaaataataggaggtaatgatatgtatcaatcggtgtgtagaaagtgttacatcgactcataatattatattttttatctaaaaaactaaaaataaacattgattaaattttaatataatacttaaaaatggatgttgtgtcgttagataaaccgtttatgtattttgaggaaattgataatgagttagattacgaaccagaaagtgcaaatgaggtcgcaaaaaaactgccgtatcaaggacagttaaaactattactaggagaattattttttcttagtaagttacagcgacacggtatattagatggtgccaccgtagtgtatataggatctgctcccggtacacatatacgttatttgagagatcatttctataatttaggagtgatcatcaaatggatgctaattgacggccgccatcatgatcctattttaaatggattgcgtgatgtgactctagtgactcggttcgttgatgaggaatatctacgatccatcaaaaaacaactgcatccttctaagattattttaatttctgatgtgagatccaaacgaggaggaaatgaacctagtacggcggatttactaagtaattacgctctacaaaatgtcatgattagtattttaaaccccgtggcgtctagtcttaaatggagatgcccgtttccagatcaatggatcaaggacttttatatcccacacggtaataaaatgttacaaccttttgctccttcatattcagctgaaatgagattattaagtatttataccggtgagaacatgagactgactcgagttaccaaattagacgctgtaaattatgaaaaaaagatgtactaccttaataagatcgtccgtaacaaagtagttgttaactttgattatcctaatcaggaatatgactattttcacatgtactttatgctgaggaccgtgtactgcaataaaacatttcctactactaaagcaaaggtactatttctacaacaatctatatttcgtttcttaaatattccaacaacatcaactgaaaaagttagtcatgaaccaatacaacgtaaaatatctagcaaaaattctatgtctaaaaacagaaatagcaagagatccgtacgcggtaataaatagaaacgtactactgagatatactaccgatatagagtataatgatttagttactttaataaccgttagacataaaattgattctatgaaaactgtgtttcaggtatttaacgaatcatccataaattatactccggttgatgatgattatggagaaccaatcattataacatcgtatcttcaaaaaggtcataacaagtttcctgtaaattttctatacatagatgtggtaatatctgacttatttcctagctttgttagactagatactacagaaactaatatagttaatagtgtactacaaacaggcgatggtaaaaagactcttcgtcttcccaaaatgttagagacggaaatagttgtcaagattctctatcgccctaatataccattaaaaattgttagatttttccgcaataacatggtaactggagtagagatagccgatagatctgttatttcagtcgctgattaatcaattagtagagatgagataagaacattataataatcaataatatatcttatatcttatatcttatatcttatatcttgtttagaaaaatgctaatattaaaatagctaacgctagtaatccaatcggaagccatttgatatctataatagggtatctaatttcctgatttaaatagcggacagctatattctcggtagctactcgtttggaatcacaaacattatttacatctaatttactatctgtaatggaaacgtttcccaatgaaatggtacaatccgatacattgcattttgttatatttttttttaaagaggctggtaacaacgcatcgcttcgtttacatggctcgtaccaacaataatagggtaatcttgtatctattcctatccgtactatgcttttatcaggataaatacatttacatcgtatatcgtctttgttagcatcacagaatgcataaatttgttcgtccgtcatgataaaaatttaaagtgtaaatataactattatttttatagttgtaataaaaagggaaatttgattgtatactttcggttctttaaaagaaactgacttgataaaaatggctgtaatctctaaggttacgtatagtctatatgatcaaaaagagattaatgctacagatattatcattagtcatgttaaaaatgacgacgatatcggtaccgttaaagatggtagactaggtgctatggatggggcattatgtaagacttgtgggaaaacggaattggaatgtttcggtcactggggtaaagtaagtatttataaaactcatatagttaagcctgaatttatttcagaaattattcgtttactgaatcatatatgtattcactgcggattattgcgttcacgagaaccgtattccgacgatattaacctaaaagagttatcgggacacgctcttaggagattaaaggataaaatattatccaagaaaaagtcatgttggaacagtgaatgtatgcaaccgtatcaaaaaattactttttcaaagaaaaaggtttgtttcgtcaacaagttggatgatattaacgttcctaattctctcatctatcaaaagttaatttctattcatgaaaagttttggccattattagaaattcatcaatatccagctaacttattttatacagactactttcccatccctccgttgattattagaccggctattagtttttggatagatagtatacccaaagagaccaatgaattaacttacttattaggtatgatcgttaagaattgtaacttgaatgctgatgaacaggttatccagaaggcggtaatagaatacgatgatattaaaattatttctaataacactaccagtatcaatttatcatatattacatccggcaaaaataatatgattagaagttatatcgtcgcccgacgaaaagatcagaccgctagatctgtaattggtcccagtacatctatcaccgttaatgaggtaggaatgcccgcatatattagaaatacacttacagaaaagatatttgttaatgcctttacagtggataaagttaaacaactattagcgtcaaaccaagttaaattttactttaataaacgattaaaccaattaacaagaatacgccaaggaaagtttattaaaaataaaatacatttattgcctggtgattgggtagaagtagctgttcaagaatatacaagtattatttttggaagacagccgtctctacatagatacaacgtcatcgcttcatctatcagagctaccgaaggagatactatcaaaatatctcccggaattgccaactctcaaaatgctgatttcgacggggatgaggaatggatgatattagaacaaaatcctaaagctgtaattgaacaaagtattcttatgtatccgacgacgttactcaaacacgatattcatggagcccccgtttatggatctattcaagatgaaatcgtagcagcgtattcattgtttaggatacaagatctttgtttagatgaagtattgaacatcttggggaaatatggaagagagttcgatcctaaaggtaaatgtaaattcagcggtaaagatatctatacttacttgataggtgaaaagattaattatccgggtctcttaaaggatggtgaaattattgcaaacgacgtagatagtaattttgttgtggctatgaggcatctgtcattggctggactcttatccgatcataagtcgaacgtggaaggtatcaactttattatcaagtcatcttatgtttttaagagatatctatctatttacggttttggggtgacattcaaagatctgagaccaaattcgacgttcactaataaattggaggccatcaacgtagaaaaaatagaacttatcaaagaagcatacgccaaatatctcaacgatgtaagagacgggaaaatagttccattatctaaagctttagaggcggactatgtggaatccatgttatccaacttgacaaatcttaatatccgagagatagaagaacatatgagacaaacgctgatagatgatccagataataacctcctgaaaatggccaaagcgggttataaagtaaatcccacagaactaatgtatattctaggtacgtatggacaacaaaggattgatggtgaaccagcagagactcgagtattgggtagagttttaccttactatcttccagactctaaggatccagaaggaagaggttacattcttaattctttaacaaaaggattaacgggttctcaatattacttttcgatgctggttgccagatctcaatctactgatatcgtctgtgaaacatcacgtaccggaacactggctagaaaaatcattaaaaagatggaggatatggtggtcgacggatacggacaagtagttataggtaatacgctcatcaagtacgccgccaattataccaaaattctaggctcagtatgtaaacctgtagatcttatctatccagatgagtccatgacttggtatttggaaattagtgctctgtggaataaaataaaacagggattcgtttactctcagaaacagaaacttgcaaagaagacattggcgccgtttaatttcctagtattcgtcaaacccaccactgaggataatgctattaaggttaaggatctgtacgatatgattcataacgtcattgatgatgtgagagagaaatacttctttacggtatctaatatagattttatggagtatatattcttgacgcatcttaatccttctagaattagaattacaaaagaaacggctatcactatctttgaaaagttctatgaaaaactcaattatactctaggtggtggaactcctattggaattatttctgcacaggtattgtctgagaagtttacacaacaagccctgtccagttttcacactactgaaaaaagtggtgccgtcaaacaaaaacttggtttcaacgagtttaataacttgactaatttgagtaagaataagaccgaaattatcactctggtatccgatgatatctctaaacttcaatctgttaagattaatttcgaatttgtatgtttgggagaattaaatccaaacatcactcttcgaaaagaaacagataaatatgtagtagatataatagtcaatagattatacatcaagagagcagaaataaccgaattagtcgtcgaatatatgattgaacgatttatctcctttagcgtcattgtaaaggaatggggtatggagacattcattgaggacgaggataatattagatttactgtctacctaaatttcgttgaaccggaagaattgaatcttagtaagtttatgatggttcttccgggggcagccaacaagggaaagattagtaaattcaagattcctatctctgattatacgggatatgacgacttcaatcaaacaaaaaagctcaataagatgactgtagaactcatgaatctaaaagaattgggttctttcgatttggaaaacgtcaacgtgtatcctggagtatggaatacatacgatatcttcggtatcgaggccgctcgtgaatacttgtgcgaagccatgttaaacacctatggagaagggttcgattatctgtatcagccttgtgatcttctcgctagtttactatgtgctagttacgaaccagaatcagtgaataaattcaagttcggcgcagctagtactcttaagagagctacgttcggagacaataaagcattgttaaacgcggctcttcataaaaagtcagaacctattaacgataatagtagctgccacttttttagcaaggtccctaatataggaactggatattacaaatactttatcgacttgggtcttctcatgagaatggaaaggaaactatctgataagatatcttctcaaaagatcaaggaaatggaagaaacagaagacttttaattcttatcaataacatatttttctatgatctgtcttttaaacgatggattttccacaaatgcgcctctcaagtccctcatagaatgatacacgtataaaaaatatagcataggcaatgactccttatttttagacattagatatgccaaaatcatagccccgcttctatttactcccgcagcacaatgaaccaacacgggctcgtttcgttgatcacatttagataaaaaggcggttacgtcgtcaaaatatttactaatatcggtagttgtatcatctaccaacggtatatgaataatattaatattagagttaggtaatgtatatttatccatcgtcaaatttaaaacatatttgaacttaacttcagatgatggtgcatccatagcatttttataatttcccaaatacacattattggttacccttgtcattatagtgggagatttggctttgtgcatatctccagttgaacgtagtagtaagtatttatacaaacttttcttatccatttataacgtacaaatggataaaactactttatcggtaaacgcgtgtaatttagaatacgttagagaaaaggctatagtaggcgtacaagcagccaaaacatcaacacttatattctttgttattatattggcaattagtgcgctattactctggtttcagacgtctgataatccagtctttaatgaattaacgagatatatgcgaattaaaaatacggttaacgattggaaatcattaacggatagcaaaacaaaattagaaagtgatagaggtagacttctagccgctggtaaggatgatatatttgaattcaaatgtgtggatttcggcgcctattttatagctatgcgattggataagaaaacatatctgccgcaagctattaggcgaggtactggagacgcgtggatggttaaaaaggcggcaaaggtcgatccatctgctcaacaattttgtcagtatttgataaaacacaagtctaataatgttattacttgtggtaatgagatgttaaatgaattaggttatagcggttattttatgtcaccgcattggtgttccgattttagtaatatggaatagtgttagataaatgcggtaacgaatgttcctgtaaggaaccataacagcttagatttaacgttaaagatgagcataaacataataaacaaaattacaatcaaacttataacattaatatcaaacaatccaaaaaatgaaatcagtggagtagtaaacgcgtacataactcctggataacgtttagcagctgccgttcctattctagaccaaaaattcggtttcatgttttcgaaacggtattctgcaacaagtcgaggatcgtgttctacatatttggcggcattatccagtatctgcctattgatcttcatttcgttttcgattctggctatttcaaaataaaatcccgatgatagacctccagactttataatttcatctacgatgttcagcgccgtagtaactctaataatataggctgataagctaacatcataccctcctgtatatgtgaatatggcatgatttttgtccattacaagctcggttttaactttattgcctgtaataatttctctcatctgtaggatatctatttttttgtcatgcattgccttcaagacgggacgaagaaacgtaatatcctcaataacgttatcgttttctacaataactacatattctacctttttattttctaactcggtaaaaaaattagaatcccatagggctaaatgtctagcgatatttcttttcgtttcctctgtacacatagtgttacaaaaccctgaaaagaagtgagtatacttgtcatcatttctaatgtttcctccagtccactgtataaacgcataatccttgtaatgatctggatcatccttgactaccacaacatttcttttttctggcataacttcgttgtcctttacatcatcgaacttctgatcattaatatgctcatgaacattaggaaatgtttctgatggaggtctatcaataactggcacaacaataacaggagttttcaccgccgccatttagttattgaaattaatcatatacaactctttaatacgagttatattttcgtctatccattgtttcacattgacatatttcgacaaaaagatataaaatgcgtattccaatgcttctctgtttaatgaattactaaaatatacaaacacgtcactgtctggcaataaatgatatcttagaatattgtaacaatttattttgtattgcacatgttcgtgatctatgagttcttcttcgaatggcataggatctccgaatctgaaaacgtataaataggagttagaataataatatttgagagtattggtaatatataaactctttagcggtataattagtttttttctctcaatttctatttttagatgtgatggaaaaatgactaattttgtagcattagtatcatgaactctaatcaaaatcttaatatcttcgtcacacgttagctctttgaagtttttaagagatgcatcagttggttctacagatggagtaggtgcaacaattttttgttctacacatgtatgtactggagccattgttttaactataatggtgcttgtatcgaaaaactttaatgcagatagcggaagctcttcgccgcgactttctacgtcgtaattgggttctaacgccgatctctgaatggatactagttttctaagttctaatgtgattctctgaaaatgtaaatccaattcctccggcattatagatgtgtatacatcggtaaataaaactatagtatccaacgatcccttctcgcaaattctagtcttaaccaaaaaatcgtatataaccacggagatggcgtatttaagagtggattcttctaccgttttgttcttggatgtcatataggaaactataaagtccgcactactgttaagaatgattactaacgcaactatatagtttaaattaagcattttggaaacataaaataactctgtagacgatacttgactttcgaataagtttgcagacaaacgaagaaagaacagacctctcttaatttcagaagaaaactttttttcgtattcctgacgtctagagtttatatcaataagaaagttaagaattagtcggttaatgttgtatttcattacccaagtttgagatttcataatattatcaaaagacatgataatattaaagataaagcgctgactatgaacgaaatagctatatggttcgctcaagaatatagtcttgttaaacgtggaaacgataactgtatttttaatcacgtcagcggcatctaaattaaatataggtatatttattccacacactctacaatatgccacaccatcttcataataaataaattcgttagcaaaattattaattttagtgaaatagttagcgtcaactttcatagcttccttcaatctaatttgatgctcacacggtgcgaattccactctaacatcccttttccatgcctcaggttcatcgatctctataatatctagttttttgcgtttcacaaacacaggctcgtctctcgcgatgagatctgtatagtaactatgtaaatgataactagatagaaagatgtagctatatagatgacgatcctttaagagaggtataataactttaccccaatcagatagactgttgttatggtcttcggaaaaagaatttttataaatttttccagtattttccaaatatacgtacttaacatctaaaaaatccttaatgataataggaatggataatccgtctattttataaagaaatacatatcgcacattatacttttttttggaaatgggaataccgatgtgtctacataaatatgcaaagtctaaatattttttagagaatcttagttggtccaaattcttttccaagtacggtaatagatttttcatattgaacggtatcttcttaatctctggttctagttccgcattaaatgatgaaactaagtcactatttttataactaacgattacatcacctctaacatcatcatttaccagaatactgatcttcttttgtcgtaaatacatgtctaatgtgttaaaaaaaagatcatacaagttatacgtcatttcatctgtggtattcttgtcattgaaggataaactcgtactaatctcttctttaacagcctgttcaaatttatatcctatatacgaaaaaatagcaaccagtgtttgatcatccgcgtcaatattctgttctatcgtagtgtataacaatcgtatatcttcttctgtgatagtcgatacgttataaaggttgataacgaaaatatttttatttcgtgaaataaagtcatcgtaggattttggacttatattcgcgtctagtagatatgcttttatttttggaatgatctcaattagaatagtctctttagagtccatttaaagttacaaacaactaggaaattggtttatgatgtataatttttttagtttttatagattctttattctatacttaaaaaatgaaaataaatacaaaggttcttgagggttgtgttaaattgaaagcgagaaataatcataaattatttcattatcgcgatatccgttaagtttgtatcgtaatggcgtggtcaattacgaataaagcggatactagtagcttcacaaagatggctgaaatcagagctcatctaaaaaatagcgctgaaaataaagataaaaacgaggatattttcccggaagatgtaataattccatctactaagcccaaaaccaaacgagccactactcctcgtaaaccagcggctactaaaagatcaaccaaaaaggaggaagtggaagaagaagtagttatagaggaatatcatcaaacaactgaaaaaaattctccatctcctggagtcagcgacattgtagaaagcgtggccgctgtagagctcgatgatagcgacggggatgatgaacctatggtacaagttgaagctggtaaagtaaatcatagtgctagaagcgatctctctgacctaaaggtggctaccgacaatatcgttaaagatcttaagaaaattattactagaatctctgcagtatcgacggttctagaggatgttcaagcagctggtatctctagacaatttacttctatgactaaagctattacaacactatctgatctagtcaccgagggaaaatctaaagttgttcgtaaaaaagttaaaacttgtaagaagtaaatgcgtgcacttttttataaagatggtaaactctttaccgataataattttttaaatcctgtatcagacgataatccagcgtatgaggttttgcaacatgttaaaattcctactcatttaacagatgtagtagtatatgaacaaacgtgggaggaggcgttaactagattaatttttgtgggaagtgattcaaaaggacgtagacaatacttttacggaaaaatgcatgtacagaatcgcaacgctaaaagagatcgtatttttgttagagtatataacgttatgaaacgaattaattgttttataaacaaaaatataaagaaatcgtccacagattccaattatcagttggcggtttttatgttaatggaaactatgttttttattagatttggtaaaatgaaatatcttaaggagaatgaaacagtagggttattaacactaaaaaataaacacatagaaataagtcccgatgaaatagttatcaagtttgtaggaaaggacaaagtttcacatgaatttgttgttcataagtctaatagactatataaaccgctattgaaactgacggatgattctagtcccgaagaatttctgttcaacaaactaagtgaacgaaaggtatacgaatgtatcaaacagtttggtattagaatcaaggatctccgaacgtatggagtcaattatacgtttttatataatttttggacaaatgtaaagtccatatctcctcttccgtcaccaaaaaagttaatagcattaactatcaaacaaactgctgaagtggtaggtcatactccatcaatttcaaaaagagcttatatggcaacgactattttagaaatggtaaaggataaaaattttttagatgtagtatctaaaactacgttcgatgaattcctatctatagtcgtagatcacgttaaatcatctacggatggatgatatagatctttacacaaataattacaagaccgataaatggaaatggataagcgtatgaaatctctcgcaatgacagctttcttcggagagctaagcacattagatattatggcattgataatgtctatatttaaacgccatccaaacaataccattttttcagtggataaggatggtcagtttatgattgatttcgaatacgataattataaggcttctcaatatttggatctgaccctcactccgatatctggagatgaatgcaagactcacgcatcgagtatagccgaacaattggcgtgtgcggatattattaaagaggatattagcgaatatatcaaaactactccccgtcttaaacgatttataaaaaaataccgcaatagatcagatactcgtatcagtcgagatacagaaaagcttaaaatagctctagctaaaggcatagattacgaatatataaaagacgcttgttaataagtaaatgaaaaaaaactagtcgtttataataaaacacgatatggatgccaacgtagtatcattttctactattgcgacgtatatagacgctttagcgaagaatgcttcggaattagaacagaggtctaccgcatacgaaataaataatgaattggaactagtatttattaagccgccattgattactttgacaaatgtagtgaatatctctacgattcaggaatcgtttattcgatttaccgttactaataaggaaggtgttaaaattagaactaagattccattatctaaggtacatggtctagatgtaaaaaatgtacagttagtagatgctatagataacatagtttgggaaaagaaatcattagtgacggaaaatcgtcttcacaaagaatgcttgttgagactatcgacagaggaacgtcatatatttttggattacaagaaatatggatcctctatccgactagaattagtcaatcttattcaagcaaaaacaaaaaactttacgatagactttaagctaaaatattttctaggatccggtgcccagtctaaaagttctttgttgcacgctattaatcatccaaagtcaaggcctaatacatctctggaaatagaattcacacctagagacaatgaaacagttccatatgatgaactaataaaggaattgacgactctctcgcgtcatatatttatggcttctccagagaatgtaattctttctccgcctattaacgcgcctataaaaacctttatgttgcctaaacaagatatagtaggtttggatctggaaaatctatatgccgtaactaagactgacggcattcctataactatcagagttacatcaaacgggttgtattgttattttacacatcttggttatattattagatatcctgttaagagaataatagattccgaagtagtagtctttggtgaggcagttaaggataagaactggaccgtatatctcattaagctaatagagcctgtgaatgcaatcaatgatagactagaagaaagtaagtatgttgaatctaaactagtggatatttgtgatcggatagtattcaagtcaaagaaatacgaaggtccgtttactacaactagtgaagtcgtcgatatgttatctacatatttaccaaagcaaccagaaggtgttattctgttctattcaaagggacctaaatctaacattgattttaaaattaaaaaggaaaatactatagaccaaactgcaaatgtagtatttaggtacatgtccagtgaaccaattatctttggagaatcgtctatctttgtagagtataagaaatttagcaacgataaaggctttcctaaagaatatggttctggtaagattgtgttatataacggcgttaattatctaaataatatctattgtttggaatatattaatacacataatgaagtgggtattaagtccgtggttgtacctattaagtttatagcagaattcttagttaatggagaaatacttaaacctagaattgataaaaccatgaaatatattaactcagaagattattatggaaatcaacataatatcatagtcgaacatttaagagatcaaagcatcaaaataggagatatctttaacgaggataaactatcggatgtgggacatcaatacgccaataatgataaatttagattaaatccagaagttagttattttacgaataaacgaactagaggaccgttgggaattttatcaaactacgtcaagactcttcttatttctatgtattgttccaaaacatttttagacgattccaacaaacgaaaggtattggcgattgattttggaaacggtgctgacctggaaaaatacttttatggagagattgcgttattggtagcgacggatccggatgctgatgctatagctagaggaaatgaaagatacaacaaattaaactctggaattaaaaccaagtactacaaatttgactacattcaggaaactattcgatccgatacatttgtctctagtgtcagagaagtattctattttggaaagtttaatatcatcgactggcagtttgctatccattattcttttcatccgagacattatgctaccgtcatgaataacttatccgaactaactgcttctggaggcaaggtattaatcactaccatggacggagacaaattatcaaaattaacagataaaaagacttttataattcataagaatttacctagtagcgaaaactatatgtctgtagaaaaaatagctgatgatagaatagtggtatataatccatcaacaatgtctactccaatgactgaatacattatcaaaaagaacgatatagtcagagtgtttaacgaatacggatttgttcttgtagataacgttgatttcgctacaattatagaacgaagtaaaaagtttattaatggcgcatctacaatggaagatagaccgtctacaaaaaactttttcgaactaaatagaggagccattaaatgtgaaggtttagatgtcgaagacttacttagttactatgttgtttatgtcttttctaagcggtaaataataatatggtatgggttctgatctcccagttctaaatgcattaaataattccaatagagcgatttttgttcctataggaccttccaactgtggatactctgtattgttaatagatatattaatacttttgtcgggtaacagaggttctacgtcttctaaaaataaaagttttataacatctggcctgttcataaataaaaacttggcgattctatatatactcttattatcaaatctagccattgtcttatagatgtgagctactgtaggtgtaccatttgattttctttctaatactatatatttctctcgaagaagttcttgcacatcatctgggaataaaatactactgttgagtaaatcagttattttttttatatcgatattgatggacatttttatagttaaggataataagtatcccaaagtcgataacgacgataacgaagtatttatacttttaggaaatcacaatgactttatcagattaaaattaacaaaattaaaggagcatgtatttttttctgaatatattgtgactccagatacatatggatctttatgcgtcgaattaaatgggtctagttttcagcacggcggtagatatatagaggtggaggaatttatagatgctggaagacaagttagatggtgttctacatccaatcatatatctaaagatatacccgaagatatgcacactgataaatttgtcatttatgatatttatacgtttgattcgttcaagaataaacgattggtattcgtacaggtacctccgtcgttaggagatgatagtcatttgactaatccgttattgtcaccgtattatcgtaattcagtagccagacaaatggtcaatgatatgatttttaatcaagattcatttttaaaatatttattagaacatctgattagaagccactatagagtttctaaacatataacaatagttagatacaaggataccgaagaattaaatctaacgagaatatgttataatagagataagtttaaggcgtttgtattcgcttggtttaacggcgtttcggaaaatgaaaaggtactagatacgtataaaaaggtatctaatttgatataatgaattcagtgactgtatcacacgcgccatatactattacttatcacgatgattgggaaccagtaatgagtcaattggtagagttttataacgaagtagccagttggctgctacgagacgagacgtcgcctattcctgataagttctttatacagttgaaacaaccgcttagaaataaacgagtatgtgtgtgtggtatagatccgtatccgaaagatggaactggtgtaccgttcgaatcaccaaattttacaaaaaaatcaattaaggagatagcttcatctatatctagattaaccggagtaattgattataaaggttataaccttaatataatagacggggttataccctggaattattacttaagttgtaaattaggagaaacaaaaagtcacgcgatttactgggataagatttccaagttactgctgcagcatataactaaacacgttagtgttctttattgtttgggtaaaacagatttctcgaatatacgggccaagttagaatccccggtaactaccatagtcggatatcatccagcggctagagaccgccaattcgagaaagatagatcatttgaaattatcaacgttttactggaattagacaacaaggcacctataaattgggctcaagggtttatttattaatgctttagtgaaattttaacttgtgttctaaatggatgcggctattagaggtaatgatgttatctttgttcttaagactataggtgtcccgtcagcgtgcagacaaaatgaagatccaagatttgtagaagcatttaaatgcgacgagttagaaagatatattgagaataatccagaatgtacactattcgaaagtcttagggatgaggaagcatactctatagtcagaattttcatggatgtagatttagacgcgtgtctagacgaaatagattatttaacggccattcaagattttattatcgaggtgtcaaactgtgtagctagattcgcgtttacagaatgcggcgccattcatgaaaatgtaataaaatccatgagatctaatttttcattgactaagtctacaaatagagataaaacaagttttcatattatctttttagatacgtataccactatggatacattgatagctatgaaacgaacactattagaattaagtagatcatctgaaaatccactaaccagatcgatagacactgccgtatataggagaaaaacaactcttcgggttgtaggtactaggaaaaatccaaattgcgacactattcatgtaatgcaaccaccgcatgataatatagaagattacctattcacttacgtggatatgaacaacaatagttattacttttctctacaacaacgattggaggatttagttcctgataagttatgggaaccagggtttatttcattcgaagacgctataaaaagagtttcaaaaatattcattaattctataataaactttaatgatctcgatgaaaataattttacaacggtaccactggtcatagattacgtaacaccttgtgcattatgtaaaaaacgatcgcataaacatccgcatcaactatcgttggaaaatggtgctattagaatttacaaaactggtaatccacatagttgtaaagttaaaattgttccgttggatggtaataaactgtttaatattgcacaaagaattttagacactaactctgttttattaaccgaacgaggagaccatatagtttggattaataattcatggaaatttaacagcgaagaacccttgataacaaaactaattttgtcaataagacatcaactacctaaggaatattcaagcgaattactctgtccaagaaaacgaaagactgtagaagctaacatacgagacatgttagtagattcagtggagaccgatacctatccggataaacttccgtttaaaaatggtgtattggacctggtagacggaatgttttactctggagatgatgctaaaaaatatacgtgtactgtatcaaccggatttaaatttgacgatacaaagttcgtcgaagacagtccagaaatggaagagttaatgaatatcattaacgatatccaaccattaacggatgaaaataagaaaaatagagagctatatgaaaaaacattatctagttgtttatgcggtgctaccaaaggatgtttaacattcttttttggagaaactgcaactggaaagtcgacaaccaaacgtttgttaaagtctgctatcggtgacctgtttgttgagacgggtcaaacaattttaacagatgtattggataaaggacctaatccatttatcgctaacatgcatttgaaaagatctgtattctgtagcgaactacctgattttgcctgtagtggatcaaagaaaattagatctgacaatattaaaaagttgacagaaccttgtgtcattggaagaccgtgtttctccaataaaattaataatagaaaccatgcgacaatcattatcgatactaattacaaacctgtttttgataggatagataacgcattaatgagaagaattgccgtcgtgcgattcagaacacacttttctcaaccttctggtagagaggctgctgaaaataatgacgcgtacgataaagtcaaactattagacgaggggttagatggtaaaatacaaaataatatatatagatttgcatttctatacttgttggtgaaatggtacaaaaaatatcatgttcctattatgaaactatatcctacacccgaagagattcctgactttgcattctatctcaaaataggtactctgttggtatctagctctgtaaagcatattccattaatgacggacctctccaaaaagggatatatattgtacgataatgtggtcactcttccgttgactactttccaacagaaaatatccaagtattttaattctagactatttggacacgatatagagagcttcatcaatagacataagaaatttgccaatgttagtgatgaatatctgcaatatatattcatagaggatatttcatctccgtaaatatatgctcatatatttatagaagatatcacatatctaaatgaataccggaatcatagatttatttgataatcatgttgatagtataccaactatattacctcatcagttagctactctagattatctagttagaactatcatagatgagaacagaagcgtgttattgttccatattatgggatcaggtaaaacaataatcgctttgttgttcgccttggtagcttccagatttaaaaaggtttacattctagtgccgaacatcaacatcttaaaaattttcaattataatatgggtgtagctatgaacttgtttaatgacgaattcatagctgagaatatctttattcattccacaacaagtttttattctcttaattataacgataacgtcattaattataacggattatctcgctacaataactctatttttatcgttgatgaggcacataatatctttgggaataatactggagaacttatgaccgtgataaaaaataaaaacaagattccttttttactattgtctggatctcccattactaacacacctaatactctgggtcatattatagatttaatgtccgaagagacgatagattttggtgaaattattagtcgtggtaagaaagtaattcagacacttcttaacgaacgcggtgtgaatgtacttaaggatttgcttaaaggaagaatatcatattacgaaatgcctgataaagatctaccaacgataagatatcacggacgtaagtttctagatactagagtagtatattgtcacatgtctaaacttcaagagagagattatatgattactagacgacagctatgttatcatgaaatgtttgataaaaatatgtataacgtgtcaatggcagtattgggacaacttaatctgatgaataatttagatactttatttcaggaacaggataaggaattgtacccaaatctgaaaataaataatggcgtgttatacggagaagaattggtaacgttaaacattagttccaaatttaaatactttattaatcggatacagacactcaacggaaaacattttatatacttttctaattctacatatggcggattggtaattaaatatatcatgctcagtaatggatattctgaatataatggttctcagggaactaatccacatatgataaacggcaaaccaaaaacatttgctatcgttactagtaaaatgaaatcgtctttagaggatctattagatgtgtataattctcctgaaaacgatgatggtagtcaattgatgtttttgttttcatcaaacattatgtccgaatcctatactctaaaagaggtaaggcatatttggtttatgactatcccagatactttttctcaatacaaccaaattcttggacgatctattagaaaattctcttacgccgatatttctgaaccagttaatgtatatcttttagccgccgtatattccgatttcaatgacgaagtgacgtcattaaacgattacacacaggatgaattaattaatgttttaccatttgacatcaaaaagctgttgtatctaaaatttaagacgaaagaaacgaatagaatatactctattcttcaagagatgtctgaaacgtattctcttccaccacatccatcaattgtaaaagttttattgggagaattggtcagacaatttttttataataattctcgtattaagtataacgataccaagttacttaaaatggttacatcagttataaaaaataaagaagacgctaggaattacatagatgatattgtaaacggtcacttctttgtatcgaataaagtatttgataaatctcttttatacaaatacgaaaacgatattattacagtaccgtttagactttcctacgaaccatttgtttggggagttaactttcgtaaagaatataacgtggtatcttctccataaaactgatgagatatataaagaaataaatgtcgagctttgttaccaatggatacctttccgttacattggaaccacacgagctgacgttagacataaaaactaatattaggaatgccgtatataagacgtatctccatagagaaattagtggtaaaatggccaagaaaatagaaattcgtgaagacgtggaattacctctcggcgaaatagttaataattctgtagttataaacgttccgtgtgtaataacctacgcgtattatcacgttggggatatagtcagaggaacattaaacatcgaagatgaatcaaatgtaactattcaatgtggagatttaatctgtaaactaagtagagattcgggtactgtatcatttagcgattcaaagtactgcttttttcgaaatggtaatgcgtatgacaatggcagcgaagtcactgccgttctaatggaggctcaacaaggtatcgaatctagttttgtttttctcgcgaatatcgtcgactcataaaaaagagaatagcggtaagtataaacacgaatactatggcaataattgcgaatgttttattctcttcgatatatttttgataatatgaaaaacatgtctctctcaaatcggacaaccatctcataaaatagttctcgcgcgctggagaggtagttgccgctcgtataatctctccagaataatatacttgcgtgtcgtcgttcaatttatacggatttctatagttctctgttatataatgcggtttgccctcatgattagacgacgacaatagtgttctaaatttagatagttgatcagaatgaatgtttattggcgttggaaaaattatccatacagcgtctgcagagtggttgatagttgttcctagatatgtaaaataatccaacttactaggcagcaaattgtctagataaaatactgaatcaaacggtgcagacgtattggcggatctaatggaatccaattgattaactatcttttgaaaatatacatttttatgatccaatacttgtaagaatatagaaataatgataagtccatcatcgtgtttttttgcctcttcataagaactatattttttcttattccaatgaacaagattaatctctccagagtatttgtacacatctatcaagtgattggatccataatcgtcttcctttccccaatatatatgtagtgatgataacacatattcattggggagaaaccctccacttatatatcctcctttaaaattaatccttactagttttccagtgttctggatagtggttggtttcgactcattataatgtatgtctaacggcttcaatcgcgcgttagaaattgcttttttagtttctatattaataggagatagttgttgcggcatagtaaaaatgaaatgataactgtttaaaaatagctcttagtatgggaattacaatggatgaggaagtgatatttgaaactcctagagaattaatatctattaaacgaataaaagatattccaagatcaaaagacacgcatgtgtttgctgcgtgtataacaagtgacggatatccgttaataggagctagaagaacttcattcgcgttccaggcgatattatctcaacaaaattcagattctatctttagagtatccactaaactattacggtttatgtactacaatgaactaagagaaatctttagacggttgagaaaaggttctatcaacaatatcgatcctcactttgaagagttaatattattgggtggtaaactagataaaaaggaatctattaaagattgtttaagaagagaattaaaagaggaaagtgatgaacgtataacagtaaaagaatttggaaatgtaattctaaaacttacaacacgggataaattatttaataaagtatatataagttattgcatggcgtgttttattaatcaatcgttggaggatttatcgcatactagtatttacaatgtagaaattagaaagattaaatcattaaatgattgtattaacgacgataaatacgaatatctgtcttatatttataatatgctagttaatagtaaatgaacttttacagatctagtataattagtcagattattaagtataatagacgactagctaagtctattatttgcgaggatgactctcaaattattacactcacggcattcgttaaccaatgcctatggtgtcataaacgagtatccgtgtccgctattttattaactactgataacaaaatattagtatgtaacagacgagatagttttctctattctgaaataattagaactagaaacatgtttagaaagaaacgattatttctgaattattccaattatttgaacaaacaggaaagaagtatactatcgtcatttttttctctagatccagctactactgataatgatagaatagacgctatttatccgggtggcatacccaaaaggggtgagaatgttccagagtgtttatccagggaaattaaagaagaagttaatatagacaattcttttgtattcatagacactcggttttttattcatggcatcatagaagataccattattaataaattttttgaggtaatcttctttgtcggaagaatatctctaacgagtgatcaaatcattgatacatttaaaagtaatcatgaaatcaaggatctaatatttttagatccgaattcaggtaatggactccaatacgaaattgcaaaatatgctctagatactgcaaaacttaaatgttacggccatagaggatgttattatgaatcattaaaaaaattaactgaggatgattgattaaaaaatataaattaatttaccatcgtgtatttttataacgggattgtccggcatatcatgtagatagttaccgtctacatcgtatactcgaccatctacgcctttaaatcctctatttattgacattaatctattagaattggaataccaaatattagtaccctcaattagtttattggtaatattttttttagacgatagatcgatggctcttgaaaccaaggttttccaaccggactcattgtcgatcggtgagaagtctttttcattagcatgaatccattctaatgatgtatgtttaaacactctaaacaattggacaaattcttttgatttgctttgaatgatttcaaataggtcttcgtctacagtaggcataccattagataatctagccattataaagtgcacgtttacatatctacgttctggaggagtaagaacgtgactattgagacgaatggctcttcctactatctgacgaagagacgcctcgttccatgtcatatctaaaatgaagatatcattaattgagaaaaaactaataccctcgcctccactagaagagaatacgcatgttttaatgcattctccgttagtgtttgattcttggttaaactcagccaccgccttgattctagtatcttttgttctagatgagaactctatattagagataccaaagactttgaaatatagtaataagatttctattcctgactgattaacaaatggttcaaagactagacatttaccatgggatgctaatattcccaaacatacatctataaatttgacgcttttctcttttaattcagtaaatagagagatatcagccgcactagcatcccctttcaatagttctccctttttaaaggtatctaatgcggatttagaaaactctctatctcttaatgaatttttaaaatcattatatagtgttgctatctcttgcgcgtattcgcccggatcacgattttgtctttcaggaaagctatcgaacgtaaacgtagtagccatacgtctcagaattctaaatgatgatatacctgtttttatttcagcgagtttagccttttgataaatttcttcttgctttttcgacatattaacgtatcgcattaatactgttttcttagcgaatgatgcagacccttctacgtcatcaaaaatagaaaactcgttattaactatatacgaacatagtcctcctagtttggagactaattctttttcatcgactagacgtttattctcaaatagcgattggtgttgtaaggatcctggtcgtagtaagttaaccaacatggtgaattcttgcacactattgacgataggtgtagccgataaacaaatcatcttatggttttttaacgcaatggtcttagataaaaaattatatactgaacgagtaggacggatcttaccatcttctttgattaatgatttagaaatgaagttatgacattcatcaataatgacgcatattctactcttggaattaatagttttgatattagtaaaaaatttatttctaaaattttgatcatcgtaattaataaaaatacaatccttcgttatctctggagcgtatctgagtatagtgttcatccaaggatcttctatcaaagcctttttcaccaataagataatagcccaattcgtataaatatccttaagatgtttgagaatatatacagtagtcattgttttaccgacacccgtttcatggaacaataaaagagaatgcatactgtctaatcctaagaaaactcttgctacaaaatgttgataatccttgaggcgtactacgtccgaccccatcatttcaacgggcatattagtagttctgcgtaaggcataatcgatataggccgcgtgtgatttactcatttatgagtgataagtaataactatgttttaaaaatcacagcagtagtttaactagtcttctctgatgtttgttttcgatactttttgaatcagaagtcatactagaataaagcaacgagtgaacgtaatagagagcttcgtatactctattcgaaaactctaagaacttattaatgaattccgtatccactggattgtttaaaatactaaattgaacactgttcacatccttccaagaagaagacttagtgacggacttaacatgagacataaataaatccaaattttttttacaaacatcactagccaccataatggcgctatctttcaaccagctatcgcttacgcattttagcagtctaacatttttaaagagactacaatatattctcatagtatcgattacacctctaccgaataaagttggaagtttaataatacaatatttttcgtttacaaaatcaaataatggtcgaaacacgtcgaaggttaacatcttataatcgctaatgtatagattgttttcagtgagatgattattagatttaatagcatctcgttcacgtttgaacagtttattgcgtgcgctgaggtcggcaactacggcgtccgctttagtactcctcccataatactttacgctattaatctttaaaatttcatagactttatctagatcgctttctggtaacatgatatcatgtgtaaaaagttttaacatgtcggtcggcattctatttagatcattaactctagaaatctgaagaaagtaattagctccgtattccagactaggtaatgggcttttacctagagacagattaagttctggcaatgtttcataaaatggaagaaggacatgcgttccctcccggatattttttacaatttcatccatttacaactctatagtttgttttcattattattagttattatctcccataatcttggtaatacttaccccttgatcgtaagataccttatacaggtcattacatacaactaccaattgtttttgtacataatagattggatggttgacatccatggtggaataaactactcgaacagatagtttatctttccccctagatacattagccgtaatagttgtcggcctaaagaatatctttggtgtaaagttaaaagttagggttcttgttccattattgctttttgtcagtagttcattataaattctcgagatgggtccgttctctgaatatagaacatcatttccaaatctaacttctagtctagaaataatatcggtcttattcttaaaatctattcccttgatgaagggatcgttaatgaacaaatccttggcctttgattcggctgatctattatctccgttatagacgttacgttgactagtccaaagacttacaggaatagatgtatcgatgatgttgatactatgtgatatgtgagcaaagattgttctcttagtggcatcactatatgttccagtaatggcggaaaactttttagaaatgttatatataaaagaattttttcgtgttccaaacattagcagattagtatgaagataaacactcatattatcaggaacattatcaatttttacatacacatcagcatcttgaatagaaacgataccatcttctggaacctctacgatctcggcagactccggataaccagtcggtgggccatcgctaacaataactagatcatccaacaatctactcacatatgcatctatataatctttttcatcttgtgagtaccctggatacgaaataaatttattatccgtatttccataataaggtttagtataaacagagagagatgttgccgcatgaacttcagttacagtcgccgttggttggtttatttgacctattactctcctaggtttctctataaacgatggtttaatttgtacattcttaaccatatatccaataaagctcaattcaggaacataaacaaattctttgttgaacgtttcaaagtcgaacgaagagtcacgaataacgatatcggatactggattgaaggttaccgttacggtaatttttgaatcggatagtttaagactgctgaatgtatcttccacatcaaacggagttttaatataaacgtatactgtagatggttctttaatagtgtcattaggagttaggccaatagaaatatcattaagttcactagaatatccagagtgtttcaaagcaattgtattattgatacaattattatataattcttcgccctcaatttcccaaataacaccgttacacgaagagatagatacgtgattaatacatttatatccaacatatggtacgtaactgaatcttcccatacctttaacttctggaagttccaaactcagaaccaaatgattaagcgcagtaatatactgatccctaatttcgaagctagcgatagcctgattgtctggaccatcgtttgtcataactccggatagagaaatatattgcggcatatacaaagttggaatttgactatcgactgcgaagacattagaccgtttaatagagtcatccccaccgatcaaagaattaatgatagtattattcattttctatttaaaatggaaaaagcttacaataaactccgtagagaaatatctataatttgtgagttttccttaaagtaacagcttccgtaaacgccgtctttatctcttagtaggtttattgtatttatgaccttttccttatcttcatagaatactaaaggcaacaaagaaatttttggttcttctctaagagctacgtgagacttaaccatagaagccaacgaatccctacatattttagaacagaaataccctacttcaccacccttgtatgtctcaatactaataggtctaaaaaccaaatcttgattacaaaaccaacacttatcaattacactatttgtcttaatagacacatctgccatagatttataatactttggtagtatacaagcgagtgcttcttctttagcgggcttaaagactgctttaggtgctgaaataaccacatctggaaggcttactcgcttagccatttaattacggaactatttttttatacttctaatgagcaagtagaaaacctctcatctacaaaaacgtactcgtgtccataatcctctaccatagttacacgttttttagatctcatatgtgctaaaaagttttcccatactaattggttactattatttttcgtataatttttaacagtttgaggttttagatttttagttacagaagtgatatcgaatattttatccaaaaagaatgaataattaattgtcttagaaggagtgttttcttggcaaaagaataccaagtgcttaaatatttctactacttcattaatcttttctgtactcagattcagtttctcatcttttacttgattgattatttcaaagactaacttataatcctttttatttattctctcgttagccttaagaaaactagatacaaaatttgcatctacatcatccgtggatatttgatttttttccatgatatccaagagttccgagataatttctccagaacattgatgagacaataatctccgcaatacatttctcaaatgaataagtttattagacacgtggaagtttgactttttttgtacctttgtacatttttgaaataccgactcgcaaaaaatacaatattcatatccttgttcagatactataccgttatgtctacaaccgctacataatcgtagattcatgttaacactctacgtatctcgtcgtccaatattttatataaaaacattttatttctagacgttgccagaaaatcctgtaatatttttagttttttgggctgtgaataaagtatcgccctaatattgttaccgtcttccgccaatatagtagttaaattatccgcacatgcagaagaacaccgcttaggcggattcagtacaatgttatatttttcgtaccaactcatttaaatatcataatctaaaatagttctgtaatatgtctagcgctaatatattgatcataatcctgtgcataaattaagatacaacaatgtctcgaaatcatcgacatggcttcttccatagttagaagatcgtcgtcaaagttagcaacgtgattcatcaacatttgctgttttgaggcagcaaatactgaaccgtcgccattcaaccattcataaaaaccatcgtctgaatccattgataatttcttgtactggtttttgagagctcgcatcaatctagcatttctagctcccggattgaaaacagaaagaggatcgtacatccagggtccattttctgtaaatagaatcgtataatgtcccttcaagaagatatcagacgatccacaatcaaagaattggtctccgagtttgtaacaaactgcggactttaacctatacatgataccgtttagcataatttctggtgatacgtcaatcggagtatcatctattagagatctaaagccggtgtaacattctccaccaaacatattcttattctgacgtcgttctacataaaacatcattgctccattaacgataacaggggaatgaacagcactacccatcacattagttcccaatggatcaatgtgtgtaactccagaacatcttccatagcctatgttaggaggagcgaacaccactcttccactattgccatcgaatgccatagaataaatatccttggaattgatagaaatcggactgtcggatgttgtgatcatcttcataggattaacaactatgtatggtgccgcctgaagtttcatatcgtaactgatgccgtttataggtctagccacagaaaccaacgtaggtctaaatccaactatagacaaaatagaagccaatatctgttcctcatctgtcataacttgagagcatccagtatgaataatcttcattagatggggatctaccgcatcatcatcgttacaataaaaaattcccattctaatgttcataattgcttttctaatcatggtatgcatgtttgctctctgaatctctgtggaaattagatctgatacacctgtaatcactatcggattatcctccgtaagacgattaaccaacaacatataattataagactttacttttctaaattcataaagttgctggattaggctataggtgtctccatgtacatacgcgttctcgagcgcaggaagtttaataccgaatagtgccatcagaataggatgaatatagtaattagtttctggttttctataaataaaagacaaatcttgtgaactagacatatcggtaaaatgcatggattggaatcgtgtagtcgacagaagaatatgatgattagatggagagtatattttatctaactctttgagttggtcaccgattctaggactagctcgagaatgaataagtactaaaggatgagtacatttcacagaaacactagcattgttcaatgtgctctttacatgggtaaggagttgaaatagctcgtttctatttgttctgacaatatttagtttattcataatgttaagcatatcctgaatagtaaagttagatgtgtcatacttgttagtagttagatatttagcaattgcattcccatcatttctcaatctcgtactccaatcatgcgtggatgctacttcgtcgatggaaaccatacaatcctttttgataggctgttgagattgatcatttcctgcacgtttaggtttggtacgttgatttctagcccctgcggatataaagtcatcgtctacaatttgggacaatgaattgcatacactacaagacaaagatttatcagaagtgtgaatatgatcttcatctaccaaagaaagagtttgattagtataactagattttagtcctgcgttagatgttaaaaaaacatcgctattgaccacggcttccattatttatattcgtagtttttactcgaaagcgtgattttaatatccaatcttattacttttggaatcgttcaaaacctttgactagttgtagaatttgatctattgccctacgcgtatactcccttgcatcatatacgttcgtcaccagatcgtttgtttcggcctgaagttggtgcatatctctttcaacattcgacatgagatccttaagggccatatcgtctagattttgttgagatgctgctcctggatttggattttgttgtgctgttgtacatactgtaccaccagtaggtgtaggagtacatacagtggccacaataggaggttgagaaagtgtaaccgttggagtagtacaagaaatacttccatccgattgttgtgtacatgtagttgttggtaacgtctgagaaggttgggtagatggcggcgtcgtcgttttttgatctttattaaatttagagataatatcctgaacagcattgctcggcgtcaacgctggaaggagtgaactcgccggcgcatcagtatcttcagacagccaatcaaaaagattagacatatcagatgatgtattagtttgttgtcgtggttttggtgtaggagcagtactactaggtagaagaataggagccgatgtagctgttggaaccggctgtggagttatatgaatagttggttgtagcggttggataggctgtctgctggcggccatcatattatctctagctagttgttctcgcaactgtctttgataatacgactcttgagactttagtcctatttcaatcgcttcatcctttttcgtatccggatccttttcttcagaataatagattgacgactttggtgtagaggattctgccagcctctgtgagaacttgttaaagaagtccatttaaggctttaaaattgaattgcgattataagattaaatggcagacacagacgatattatcgactatgaatccgatgatctcaccgaatacgaggatgatgaagaagaggaagaagatggagagtcactagaaactagtgatatagatcccaaatcttcttataagattgtagaatcagcatccactcatatagaagatgcgcattccaatcttaaacatatagggaatcatatatctgctcttaaacgacgctatactagacgtataagtctatttgaaatagcgggtataatagcagaaagctataacttgcttcaacgaggaagattacctctagtttcagaattttctgacgaaacgatgaagcaaaatatgctacatgtaattatacaagagatagaggagggttcttgtcctatagtcatcgaaaagaacggagaattgttgtcggtaaacgattttgacaaagatggtctaaaattccatctagactatattatcaaaatttggaaacttcaaaaacgatattagaatttatacgaatatcgttctctaaatgtcacaatcaagtctcgcatgttcagcaatttattgtcgtactttatatcgtgttcattaacgatatcttgcaaaatagtaatgattctatcttccttcgatagatattcttcagagattattgtcttatattctttcttgttatcagatatgaatttgataagactttgaacattattgatacccgtctgtttaattttttctacagatattttagttttggcagattctatcgtatctgtcaatagacatccaacatcgacattcgacgtcaattgtctataaatcaacgtataaattttagaaataacattagcgaattgttgtgcgttgatgtcgttattctgaaacagtatgattttaggtagcattttcttaacaaagagaacgtatttattgttactcagttgaacagatgatatatccagattactaacgcatctgattccgtataccaaactttcagaagaaatggtatacaattgtttgtattcattcaatgtctctttttcagaaattagtttagagtcgaatactgcaataattttcaagagatagttttcatcagataagattttatttagtgtagatatgataaaactattgttttgttggagaacttgatacgccgcgttctctgtagtcgacgctctcaaatgggaaacaatctccattatttttttggaatcggatactatatcttcggtatcttgacgcagtctagtatacatagagttaagagagattagagtttgtacattaagcaacatgtctctaaatgtggctacaaacttttcctttttcacatcatctagtttattatataccgatttcacaacggcaccagatttaaggaaccagaatgaaaaactctgataactacaatatttcatcatagttacgattttatcatcttctatagttggtgtaatagcgcatacctttttctccaagactggaaccaacgtcataaaaatgtttaaatcaaaatccatatcaacatctgatgcgctaagaccagtctcgcgttcaagattatctttactaatggtgacgaactcatcgtataaaactctaagtttgtccattatttatttacagatttagttgtttaatttatttgtgctcttccagagttgggatagtatttttctaacgtcggtattatattattaggatctacgttcatatgtatcataatattaatcatccacgttttgataaatctatctttagcttctgaaataacgtatttaaacaaaggagaaaaatatttagctacggcatcagacgcaataacattttttgtaaatgtaacgtatttagacgacagatcttcgttaaaaagttttccatctatgtagaatccatcggttgttaacaccattcccgcgtcagattgaataggagtttgaatagtttgttttggaaatagatccttcaataacttatagttgggtgggaaaaaatcgattttatcactagactctttcttttttactatcattacctcatgaactatttcttgaatgagtatatgtattttctttcctatatcggacgcgttcattggaaaatataccatgtcgttaactataagaatatttttatcctcgtttacaaactgaataatatcagatgtagttcgtaaacgaactatatcatcaccagcacaacatctaactatatgatatccactagtttcctttagccgtttattatcttgttccatattagcagtcattccatcatttaagaaggcgtcaaaaataatagggagaaatgacattttggattctgttacaactttaccaaaattaaggatatacggacttactatctttttctcaacgtcaatttgatgaacacacgatgaaaatgtgcttctatgagattgatcatgtagaaaacaacaagggatacaatatttccgcatatcatgaaatatattaagaaatcccaccttattatatttccccaaaggatccatgcacgtaaacattatgccgttatcattaataaagacttctttctcatcggatctgtaaaagttgttactgatttttttcattccaggatctagataattaataatgatgggttttctattcttattctttgtattttggcatatcctagaccagtaaacagtttccactttggtaaaatcagcagacttttgaacgctattaaacatggcattaatggcaataactaaaaatgtaaaatatttttctatgttaggaatatggtttttcactttaatagatatatggtttttggccaaaatgatagatatttttttatccgaggatagtaaaatattattagtcgccgtctctataaaaatgaagctagtctcgatatccaattttattctagaattgataggagtcgccaaatgtaccttatacgttatatctcccttgatgcgttccatttgtgtatctatatcggacacaagatctgtaaatagttttacgttattaatcatcacggtatcgccgtcgctagataacgctaatgtaccatccaagtcccaaatggagagatttaactgttcatcgtttagaataaaatgattaccggtcatattaataaagtgttcatcgtatctagataacaacgacttataattaatgtccaagtcttgaactcgctgaatgatcttttttaacccagttagttttagattggtacgaaatatattgttaaactttgattctacagtaatgtccaaatctagttgtggaaatacttccatcaacattgtttcaaacttgataatattattatctacatcttcgtacgatccaaattccggaatagatgtatcgcacgctctggccacccagataaccaaaaagtcacacgctccaggatatacattgtataaaaagctatcgttttttagtagggtttttttctgcgtgtatacgaagggattaaaaatagtattatcaacgtaactatattccaaattattcttatgagaatagataataatatcgtccttaatatctaacaaatttcctaaatatccctttaattgagtcattcgaagcgtcaatagaatatgtctcttaactatttccggctgttgtatatttaaatgacttcgtaaaaaataatatatgggcgacttctcatctatgtaatcatatggagtgagatatagggctcgttctacctcctgccccttacccacctgtaataccaattgcggacttactatatatcgcatatttatatcgtggggtaaagtgaaaatctactaccgatgatgtaagtcttacaatgttcgaaccagtaccagatcttaatttggaggcctccgtagaactaggggaggtaaatatagatcaaacaacacctatgataaaggagaatagcggttttatatcccgcagtagacgtctattcgcccatagatctaaggatgatgagagaaaactagcactacgattctttttacaaagactttattttttagatcatagagagattcattatttgttcagatgcgttgacgctgtaaaagacgtcactattaccaaaaaaaataacattatcgtggcgccttatatagcacttttaactatcgcatcaaaaggatgcaaacttacagaaacaatgattgaagcattctttccagaactatataatgaacatagtaagaaatttaaattcaactctcaagtatccatcatccaagaaaaactcggataccagtttggaaactatcacgtttatgattttgaaccgtattactctacagtagctctggctattcgagatgaacattcatctggcatttttaatatccgtcaagagagttatctggtaagttcattatctgaaataacatatagattttatctaattaatctaaaatctgatcttgttcaatggagtgctagtacgggcgctgtaattaatcaaatggtaaatactgtattgattacagtgtatgaaaagttacaactggtcatagaaaatgattcacaatttacatgttcattggctgtggaatcaaaacttccaataaaattacttaaagatagaaatgaattatttacaaaattcattaacgagttaaaaaagaccagttcattcaagataagcaaacgcgataaggatacgctactaaaatattttacttaggactggagttagaatttatagacgactcatttcgtttatcattgttactattattactattactatcattattagtgttggcattattagtattcttcttgtcatcttgttcagaaatatacagcaatgctatacctaatactaaatacattatcatgctcgcaatggctctaacaacaacgaaccaaaatgaatttggtcgtagcttttgttcacaaaaatacataaagaaatgtctacataaatctatggcgccattggctacttgaaatagcgccagtcctcctacagattttaatatagctgtataacatgacatttattcatcatcaaaagagacagagtcaccatctgtcatatttagattttttttcatgtgttcaaagtatcctctactcatttcattataatagtttatcatacttagaattttaggacggatcaatgagtaagacttgactagatcgtcagtagtaatttgtgcatcgtctattctgcatccgcttcgtcgaataatgtatagcatcgctttgagattctccatagctatcaagtctttatacaatgacatggaaatatctgtgaatactttatacttctccaacatcgatgccttaacatcatcgcctactttagcattgaaaatacgttctattgtgtagatggatgtagcaagatttttaaacaacaatgccatcttacacgatgattgcctcaagtctccaatcgtttgtttagaacgattagctacagagtccaatgcttggctgactagcatattattatctttagaaattgtattcttcaatgaggcgtttatcatatctgtgatttcgttagtcatattacagtctgactgggttgtaatgttatccaacatatcacctatggatacggtacacgtaccagcatttgtaataatcctatctaagatgttgtatggcattgcgcagaaaatatcttctcctgtaatatctccactctcgataaatctactcagattattcttaaatgccttattctctggagaaaagatatcagtgtccatcatttcattaatagtatacgcagaaaagataccacgagtatcaattctatccaagatacttatcggttccgagtcacagataatggtttcctctccttcgggagatcctgcatagaaatatctaggacaatagtttctatactgtctgtaactctgataatctctaaagtcactaactgataccatgaaattgagaagatcaaacgctgaagtaattaatttttctgcctcgtttttactacaactagttttcatcaatgtagtgacgatgtattgtttagttacttttggtctaatactgatgatagagatattattgcttcccataatggatcttctagtagtcaccttaaagcccattgatgcgaatagcagatagataaagtcttggtatgactcctttctaatatagtacggactacctttgtcacccaactttatacccacataagccataacaacctctttaatagccgtttcatgaggtttatcagccatgagcctgagtagttggaagaatctcatgaatcccgtctcagaaagtcctatatgcatgatagatttatctttcctgggaaactctcgtatagtcatagatgaaatactctttaaagtttctgaaataagattagtaacagtcttacctccgactactctaggtaacaaacaaactctaataggtgttttctctgcggagataatatcagaaaggatagagcaataagtagtattattgtgattataaagaccgaatacataacaggtagaatttataaacatcatgtcctgaaggtttttagacttgtattcctcgtaatccataccgtcccaaaacatggatttggtaactttgatagccgtagatctttgttccttcgccaacaggttaaagaaattaataaagaatttgttgtttctatttatgtccacaaattgcacgtttggaagcgccacggttacattcactgcagcattttgaggatcgcgagtatgaagtacgatgttattgtttactggtatatctggaaagaaatctaccagtctaggaataagagattgatatcgcatagaaatagtaaagtttataatctcatcatcgaagagcattttgttaccattgtaataaatatccactctgtcatatgtataaatgaagtactgttcaaacatgatgagatgtttatatgttggcatagtagtgagatcgacgtttggtaatggcaatgtattaagattaactccataatgtctagcagcatctgcgatgttataagcgtcgtcaaagcggggtcgatcttgtattgttatatattgtctaacacctataagattatcaaaatcttgtctgcttaatacaccgttaacaatttttgccttgaattcttttattggtgcattaataacatccttatagaggatgttaaacaaataagtgttatcaaagttaagatctggatatttcttttctgctagaacatccattgagtcggagccatctggtttaatataaccaccgataaatctagctctgtattctgtatccgtcaatctaatattaagaaggtgttgagtgaaaggtggaagatcgtaaaagctgtgagtattaatgataggattagtttccgaactaatgttaattggggtattaataatatctatatttccagcgttaagtgtaacattaaacagttttaattcacgtgacgtggtatcaattaaataattaatgcccaatttggatatagcagcctgaagctcatcttgtttagttacggatcctaatgagttattaagcaatatatcgaacggatgaacgaaggttgttttaagttggtcacatactttgtaatctagacatagatgcggaagaacggtagaaactatacgaaataaatattcagagtcctctaattgatcaagagtaactattgacttaataggcatcatttatttagtattaaatgacgaccgtaccagtgacggatatacaaaacgatttaattacagagttttcagaagataattatccatctaacaaaaattatgaaataactcttcgtcaaatgtctattctaactcacgttaacaacgtggtagatagagaacataatgccgccgtagtgtcatctccagaggaaatatcctcacaacttaatgaagatctatttccagatgatgattcaccggccactattatcgaacgagtacaacctcatactactattattgacgatactccacctcctacgtttcgtagagagttattaatatcggaacaacgtcaacaacgagaaaaaagatttaatattacagtatcgaaaaatgctgaagcaataatggaatctagatctatgataacttctatgccaacacaaacaccatccttgggagtagtttatgataaagataaaagaattcagatgttagaggatgaagtggttaatcttagaaatcaacgatctaatacaaaatcatctgataatttagataattttaccaaaatactatttggtaagactccgtacaaatcaacagaagttaataagcgtatagccatcgttaattatgcaaatttgaacgggtcccccttatcagtcgaggacttggatgtttgttcggaggatgaaatagatagaatctataaaacgattaaacaatatcacgaaagtagaaaacgaaaaattatcgtcactaacgtgattattattgtcataaacattatcgagcaggcattgctaaaactcggatttgaagaaatcaaaggactgagtaccgatatcacttcagaaattatcgatgtggagatcggagatgactgcgatgctgtagcatctaaactaggaatcggtaacagtccggttcttaatattgtattgtttatactcaagatattcgttaaacgaattaaaattatttaatttaatacattcccatatccagacaacaatcgtctggattaatctgttcctgtcgtctcataccggacgacatattaatctttttattagtgggcatctttttagatggtttctttttcccagcattaactgagtcgatacctagaagatcgtgattgatctctccgaccattccacgaacttctaattggccgtctctgacggtaccataaactattttaccagcattagtaacagcttggacaatctgaccatccatcgcattgtacgatgtagtagtaactgttgttctacgtctaggagcaccagaagtatttttggagcccttggatgttgatgtagaagaagacgaggattttgattttggtttacatgtaatacattttgaactctttgattttgtatcacatgcgccggcagtcacatctgtttgagaattaagattattgttgcctcctttgacggctgcatctccaccgatttgcgctagtagatttttaagctgtggtgtaatcttattaactgtttcgatataatcatcgtaactgcttctaacggctaaattttttttatccgccatttagaagctaaaaatatttttatttatgcagaagatttaactagattatacaatgaactaatatgatccttttccagattatttacaaacttggtattttttggttctggaggaggcgaatttaaattcggacttggattcggattttgtaagttcttgatcttattatacatcgagtataggatggcgacagtaactgctacacaaataccgatcaaaagaagaataccaatcatttattgacaataacttcactattgatcaagtatgcaatatatcatcttttcactaaataagtagtaataatgattcaacaatgtcgagatatatggacgataataatttagttcatggaaatatcgctatgattggtgtgaatgactccgctaactctgtggggtgcgcagtgctttccccacatagaataaattagcattccgactgtgataataataccaagtataaacgccataatactcaatactttccatgtacgagtgggactggtagacttactaaagtcaataaaggcgaagatacacgaaagaatcaaaagaatgattccagcgattagcacgccggaaaaataatttccaatcataagcatcatgtccatttaactaataaaaattttaaatcgccgaatgaacaaagtggaatataaaccatataaaaacaatagtttgtactgcaaaaataatatctatttttgttttcgaagatatggtaaaattaaatagtagtacacagcatgttataactaacagcagcaacggctcgtaattacttatcatttactagacgaaaaggtggtgggatattttcttgctcaaataatacgaatatatcacccatccattttatgcgatgtttatatactctaatctttaatagatctatagacgacgggtttaccaacaatatagattttatcgattcatctaatttaaacccttccttaaacgtgaatgatctattatctggcataacgatgaccctacctgatgaatcggacaatgtactgggccatgtagaataaattatcaacgaattatcgtctacgaacatttatatcatttgttttaattttaggacgcgaataaatggatataaaatagaaaataacagatattacaaccagtgttatggccgcgcccaaccaggtaggcagttttattttatcttttactacaggttctcctggatgtacgtcaccaacggcggacgtagttctagtacaattagacgtaagttccgcttgggaattttttaacgctaaagagttaacgttaatcgtgcacccaacgtatttacatctagttcgttgaacatcttgattataatataaccattttctatctctagattcgtcagtgcactcatgtaaccaacataccctaggtcctaaatatttatctccggaattagattttggataattcgcgcaccaacaatttctatttcctttatgatcgttacaaaagacgtataatgccgtatccccaaaagtaaaataatcaggacgaataattctaataaactcagaacaatatctcgcatccatatgtttggagcaaatatcggaataagtagacatagccggtttccgttttgcacgtaaccattctaaacaattggggtttccaggatcgtttctacaaaatccagtcatgaaatcgtcacaatgttctgtcttgtaattattattaaatatttttggacagtgtttggtatttgtcttagaacaacattttgccacgctatcactatcgcccaggagataatccttttttataaaatgacatcgttgcccggatgctatataatcagtagcgtgttttaaatccttaatatattcaggagttacctcgttctgataatagattaatgatccaggacgaaatttgaaagaactacatggttctccatgaattaatacatattgtttagcaaattcaggaactataaaactactacaatgatctatcgacataccatctatcaaacaaaacttgggtttaatttctcccggagatgtttcataatagtacgtataactttcttctgcaaacttaacagctctattatattcaggataattaaaacctaattccatatatttgtctcgtatatctgctattcctggtgctattttgattctattaagagtaacagctgcccccattcttaataatcgtcagtatttaaactgttaaatgttggtatatcaacatctaccttatttcccgcagtataaggtttgttgcaggtatactgttcaggaatggttacatttatacttcttctatagtcctgtctttcgatgttcatcacatatgcaaagaacagaataaacaaaataatgtaagaaataatattaaatatctgtgaattcgtaaatacattgattgccataataattacagcagctacaatacacacaatagacattcccacagtgttgccattacctccacgatacatttgagttactaagcaataggtaataactaagctagtaagaggcaatagaaaagatgagataaatatcatcaatatagagattagaggagggctatatagagccaagacgaacaaaatcaaaccgagtaacgttctaacatcattatttttgaagattcccaaataatcattcattcctccataatcgttttgcatcatacctccatctttaggcataaacgattgctgctgttcctctgtaaataaatctttatcaagcactccagcacccgcagagaagtcgtcaagcatattgtaatatcttaaataactcatttatatattaaaaaatgtcactattaaagatggagtataatctttatgccgaactaaaaaaaatgacttgtggtcaacccctaagtctttttaacgaagacggggatttcgtagaagttgaaccgggatcatcctttaagtttctgatacctaagggattttacgcctctccttccgtaaagacgagtctagtattcgagacattaacaacgaccgataataaaatcactagtatcaatccaacaaatgcgccaaagttatatcctcttcaacgcaaagtcgtatctgaagtagtttctaatatgaggaaaatgatcgaatcaaaacgtcctctatacatcactcttcacttggcgtgtggatttggtaagactattaccacgtgttatcttatggctacacacggtagaaaaaccgtcatttgcgtacccaataaaatgttaatacatcaatggaagacacaggtagaggcagtcggattggaacataagatatccatagatggagtaagtagtctattaaaggaactaaagactcaaagtccggatgtattaatagtagtcagtagacatctgacaaacgatgccttttgtaaatatatcaataagcattatgatttgttcatcttggatgaatcacatacgtataatctgatgaacaatacagcagttacaagatttttagcgtattatcctccgatgatgtgttattttttaactgctacacctagaccatctaaccgaatttattgtaacagtattattaatattgccaagttatccaatctaaaaaaaactatctatgcagtagatagtttttttgagccatattccacagataatattagacatatggtaaaacgactagatggaccatctaataaatatcatatatataccgagaagttattatctgtagacgagcctagaaatcaacttattcttgataccctggtagaagaattcaagtcaggaactattaatcgcattttagttattactaaactacgtgaacatatggtattattctacaaacgattattagattttttcggaccagaggttgtatttataggagacgcccaaaatagacgtactccagatatggtcaaatcaatcaaggaactaaatagatttatattcgtatccaccttattttattccggtactggtttagatattcctagtttggattcgttgttcatttgctcggcagtaatcaacaatatgcaaatagagcaattactagggagggtatgtcgagaaacagaactattagataggacggtatatgtatttcctaacacatccatcaaagaaataaagtacatgataggaaatttcatgcaacgaattattagtctgtctgtagataaactaggatttaaacaaaaaagttatcggaaacatcaagaatccgatcccacttctgcatgtacaacatcatccagagaagaacgtgtattaaatagaatatttaactcgcaaaatcgttaagaagtttaagcgacgatccgcatgctgcgcaggccagtgtattacccctcatagtattaatataatccaatgatacttttgtgatgtcggaaatcttaaccaatttagactgacaggcagaacacgtcatgcaatcatcatcgtcatcgataactgtagtcttgggcttctttttgcgactcttcattccggaacgcacattggtgctatccatttaggtagtaaaaaataagtcagaatatgccctataacacgatcgtgcaaaacctggtatatcgtctctatctttatcacaatatagtgtatcgacatttttattattattgacctcgtttatcttggaacatggaatgggaacatttttgttatcaacggccatctttgccttaattccagatgttgtaaaattataactaaacagtctatcatcgacacaaatgaaattcttgtttagacgtttgtagtttacgtatgcggctcgttcgcgtctcattttttcagatattgcaggtactataatattaaaaataagaatgaaataacataggattaaaaataaagttatcatgacttctagcgctgatttaactaacttaaaagaattacttagtctgtacaaaagtttgagattttcagattctgcggctatagaaaagtataattctttggtagaatggggaacatctacttactggaaaataggcgtgcaaaaggtagctaatgtcgagacgtcaatatctgattattatgatgaggtaaaaaataaaccgtttaatattgatccgggctattacattttcttaccggtatattttgggagcgtctttatttattcgaagggtaaaaatatggtagaacttggatctggaaactcttttcaaataccagatgatatgcgaagtgcgtgtaacaaagtattagacagcgataacggaatagactttctgagatttgttttgttaaacaatagatggataatggaagatgctatatcaaaatatcagtctccagttaatatatttaaactagctagtgagtacggattaaacatacccaaatatttagaaattgaaatagaggaagacacattatttgacgacgagttatactctattatagaacgctctttcgatgataaatttccaaaaatatccatatcgtatattaagttgggagaacttagacggcaagttgtagactttttcaaattctcattcatgtatattgagtccatcaaggtagatcgtataggagataatatttttattcctagcgttataacaaaatcaggaaaaaagatattagtaaaagatgtagaccatttaatacgatccaaggttagagaacatacatttgtaaaagtaaaaaagaaaaacacattttccattttatacgactatgatggaaacggaacagaaactagaggagaagtaataaaacgaattatagacactataggacgagactattatgttaacggaaagtatttctctaaggttggtagtgcaggcttaaagcaattgactaataaattagatattaatgagtgcgcaactgtcgatgagttagttgatgagattaataaatccggaactgtaaaacgaaaaataaaaaaccaatcagcatttgatttaagcagagaatgtttgggatatccagaagcggattttataacgttagttaataacatgcggttcaaaatagaaaattgtaaggttgtaaatttcaatattgaaaatactaattgtttaaataacccgagtattgaaactatatatggaaactttaaccagttcgtctcaatctttaatgtcgtcaccgatgtcaaaaaaagattattcgagtgaaataatatgcgcctttgatataggtgcaaaaaatcctgccagaactgttttagaagtcaaggataactccgttagggtattggatatatcaaaattagactggagttctgattgggaaaggcgcatagctaaagatttgtcacaatatgaatacactacagttcttctagaacgtcagcctagaaggtcgccgtatgttaaatttatctattttattaaaggctttttatatcatacatcggctgccaaagttatttgcgtctcgcctgtcatgtctggtaattcatatagagatcgaaaaaagagatcggtcgaagcatttcttgattggatggacacattcggattgcgagactccgttccggatagacgcaaattagacgatgtagcggatagtttcaatttggctatgagatacgtattagataaatggaatactaattatacaccttataataggtgtaaatctagaaattacataaaaaaaatgtaataacgttagtaacgccattatggataatctatttacctttctacatgaaatagaagatagatatgccagaactatttttaactttcatctaataagttgcgatgaaataggagatatatatggtcttatgaaagaacgcatttcctcagaggatatgtttgataatatagtgtataataaagatatacatcctgccattaagaaactagtgtattgcgacatccaacttactaaacacattattaatcagaatacgtatccggtatttaacgattcttcacaagtgaaatgttgtcattatttcgacataaactcagataatagcaatattagctctcgtacagtagagatatttgagagggaaaagtcatctcttgtatcatatattaaaactaccaataagaagagaaaggtcaattacggcgaaataaagaaaactgttcatggaggcactaatgcaaattacttttccggtaaaaagtctgacgagtatctgagtactacagttagatccaacattaatcaaccttggatcaaaaccatctctaagaggatgagagttgatatcattaatcactctatagtaacgcgtggaaaaagctctatattacaaactatagaaattatttttactaatagaacatgtgtgaaaatattcaaggattctactatgcacattattctatccaaggacaaggatgaaaaggggtgtatacacatgattgacaaattattctatgtctattataatttatttctgttgttcgaagatatcatccaaaacgagtactttaaagaagtagctaatgttgtaaaccacgtactcacggctacggcattagatgagaaattattcctaattaagaaaatggctgaacacgatgtttatggagttagcaatttcaaaatagggatgtttaacctgacatttattaagtcgttggatcataccgttttcccctctctgttagatgaggatagcaaaataaagttttttaaggggaaaaagctcaatattgtagcattacgatctctggaggattgtataaattacgtgactaaatccgagaatatgatagaaatgatgaaggaaagatcgactattttaaatagcatagatatagaaacggaatcggtagatcgtctaaaagaattgcttctaaaatgaaaaaaaacactaattcagaaatggatcaacgactagggtataagtttttggtgcctgatcctaaagccggagttttttatagaccgttacatttccaatatgtatcgtattctaattttatattgcatcgattgcatgaaatcttgaccgtcaagcggccactcttatcgtttaagaataatacagaacgaattatgatagaaattagcaatgttaaagtgactcctccagattactcacctataatcgcgagtattaaaggtaagagttatgacgcattagccacgttcactgtaaatatctttaaagaggtaatgaccaaagagggtatatccatcactaaaataagtagttatgagggaaaagattctcatttgataaaaattccgctactaataggatacgggaataaaaatccacttgatacagccaagtatcttgttcctaatgtcataggtggagtctttatcaataaacaatctgtcgaaaaagtaggaattaatctagtagaaaagattacaacatggccaaaatttagggttgttaagccaaactcattcactttctcgttttcctccgtatcccctcctaatgtattaccgacaagatatcgccattacaagatatctctggatatatcacaattggaagcgttgaatatatcatcgacaaagacatttataacggtcaatattgttttgctgtctcaatatttatctagagtgagtctagaattcattagacgtagtttatcatacgatatgcctccagaagttgtctatctagtaaacgcgataatagatagtgctaaacgaattactgaatctattactgactttaatattgatacatacattaatgacctggtggaagctgaacacattaaacaaaaatctcagttaacgatcaacgagttcaaatatgaaatgctgcataactttttacctcatatgaactatacacccgatcaactaaagggattttatatgatatctttactaagaaagtttctctactgtatcttccacacttctagatatccagatagagattcgatggtttgtcatcgcatcctaacgtacggcaaatattttgagacgttggcacatgatgaattagagaattacataggcaacatccgaaacgatatcatgaacaatcacaagaacagaggcacttacgcggtaaacattcatgtactaacaactcccggacttaatcacgcgttttctagcttattgagtggaaagttcaaaaagtcagacggtagttatcgaacacatcctcactattcatggatgcagaatatttctattcctaggagtgttggattttatccggatcaagtaaagatttcaaagatgttttctgtcagaaaataccatccaagtcaatatctttacttttgttcatcagacgttccggaaagaggtcctcaggtaggtttagtatctcaattgtctgtcttgagttccattacaaatatactaacgtctgagtatttggatttggaaaagaaaatttgtgagtatatcagatcatattataaagatgatataagttactttgaaacaggatttccaatcactatagaaaatgctctagtcgcatctcttaatccaaatatgatatgtgattttgtaactgactttagacgtagaaaacggatgggattcttcggtaacttggaggtaggtattactttagttagggatcacatgaatgaaattcgcattaatattggagcgggaagattagtcagaccattcttggttgtggataacggagagctcatgatggatgtgtgtccggagttagaaagcagattagacgacatgacattctctgacattcagaaagagtttccgcatgtcatcgaaatggtagatatagaacaatttacttttagtaacgtatgtgaatcggttcaaaaatttagaatgatgtcaaaggatgaaagaaagcaatacgatttatgtgactttcctgccgaatttagagatggatatgtagcatcttcattagtgggaatcaatcacaattctggacccagagctattcttggatgtgctcaagctaaacaagctatctcttgtctgagctcggatatacgaaataaaatagacaatggaattcatttgatgtatccagagaggccaatcgtgattagtaaggctttagaaacttcaaagattgcggctaattgcttcggccaacatgttactatagcattaatgtcgtacaaaggtatcaatcaagaggatggaattatcatcaaaaaacaatttattcagagaggcggtctcgatattgttacagccaagaaacatcaagtagaaattccattggaaaactttaataacaaagaaagagataggtctaacgcctattcaaaattagaaagtaatggattagttagactgaatgctttcttggaatccggagacgctatggcacgaaatatctcatcaagaactcttgaagatgattttgctagagataatcagattagcttcgatgtttccgagaaatataccgatatgtacaaatctcgcgttgaacgagtacaagtagaacttactgacaaagttaaggtacgagtattaaccatgaaagaaagaagacccattctaggagacaaatttaccactagaacgagtcaaaagggaacagtcgcgtatgtcgcggatgaaacggaacttccatacgacgaaaatggtatcacaccagatgtcattattaattctacatccatcttctctagaaaaactatatctatgttgatagaagttattttaacagccgcatattctgctaagccgtacaacaataagggagaaaaccgacctgtctgttttcctagtagtaacgaaacatccatcgatacatatatgcaattcgctaaacaatgttatgagcattcaaatccgaaattgtccgatgaagaattatcggataaaatcttttgtgaaaagattctctatgatcctgaaacggataagccttatgcatccaaagtattttttggaccaatttattacttgcgtctgaggcatttaactcaggacaaggcaaccgttagatgtagaggtaaaaagacgaagctcattagacaggcgaatgagggacgaaaacgtggaggaggtatcaagttcggagaaatggagagagactgtttaatagcgcatggtgcagccaatactattacagaagttttgaaagattcggaagaagattatcaagatgtgtatgtttgtgaaaattgtggagacatagcagcacaaatcaagggtattaatacatgtcttagatgttcaaaacttaatctctctcctctcttaacaaaaattgataccacgcacgtatctaaagtatttcttactcaaatgaacgccagaggcgtaaaagtcaaattagatttcgaacgaaggcctccttcgttttataaaccattagataaagttgatctcaagccgtcttttctggtgtaatattctagtttggtagtagatacatatcaatatcatcaaattcgagatccgaattataaaatgggcgtggattgttaactatagaatcggacgtctgatattcgaaaatctgtggagtttcaggttttggtggaggtgtaactgctacttgggatactgaagtctgatattcagaaagctgtggatgttctggttcggcatccaccgatggtgtcacatcactaatcggttcggtaacgtctgtggatggaggtgctacttctacagaacctgtagcctcagttgtcaacggagatacatttttaatgcgagaaaatgtataatttggtaatggtttcttatgtggatctgaagaagaggtaagatatctactagaaagataccgatcacgttctagttctcttttgtagaacttaactttttctttctccgcatctagttgatattccaacctcttcacgttactacgttcagattccaattcacgttcgcatgggttacctccgcagtttttacgagcgatttcacgttcagccttcatgcgtctctccctctctctatcgagtttatcagagcagtctttctgaaggcgatcgaactccataaatttctccaacgctttgattgtttccatagatttccgaagttcagcttttaggactgtgattctttttctttcgaattcacagctggatgtacaaccgtttccattaccgccatctctaagtttcttttctagatcggcaacatttcatccccatgccttttacattcctcgagtctactgtcgtcgaaatatcgttccagctccttttcgacatcaataactttagcacgttgtctctcaagctctcttttgtagttatctgattccctggcacgtttaagatcttcatgcaattgagtcagctcttaacttcctctcttgcttcttcgtcatagtacgcgcaatcactgtgagatccattgttaccacgtctacactcggcgagctcgcgtttaagagattcaatttcccgtttgtattggtccatgtttccattgctaccaccattagatttacaggctgctagttgtcgttcgagatcagaaatacgggttttcttggaattgatttcgtcgatgtacttggcatcgaaacacttattaagttctttttccaattctacgattttatttctttcgcgagtcaattccctcctgtagtaactatctgttttgtcagattcacgctctctacgtagactttcttgcaagttactaatttgttccctagcacgtccgagtttagttttatatgctgaatagagttctgattcatcctttgagcagatctctagcgatcgtttaagattcctaattctagtctttagcctatttacctcctcagaagatgttccgttaccgttgcgtttacactcgttaagctgtctatcaagatccatgattctatctctaagacgttgcatctctctttccatatcagcattgctttcattattacgtctgcagtcactcaactgtctttcaatatctgagattctatctctaagacgtcgcatctctctctgtttcggcattggtttcattattacgtttacagtcgttcaactgtctttcaagatctgatattctagattggagtctgctaatctctgtagcattttcacggcattcactcagttgtctttcaagatctgaaattttagattggagtctgctaatctctgtaagatttcctcctccgctctcgatgcagtcggtcaacttattctctagttctctaatacgcgaacgcagtgcatcaacttcttgcgtgtcttcctggttgcgtgtacattcatcgagatctctaacgcgtcgtcgttcttcctcaagttctctgcgtactacagaaagcgtgtccctatcttgttgatatttagcaatttctgattctagagtactgattttgcttacgtagttactaatagttgtcttggccttatcaagatcctccttgtatttgtcgcattccttgatatccctacgaagtctggacagttcccattcgacattacgacgtttatcgatttcagctcggagatcgtcatcgcgttgttttagccacatacgactgagttcaagttctcgttgacaagatccatctacttttccattcctaatagtatccagttccttttctagttctgaacgcatttctcgttccctatcaagcgattctctcaattctcggatagtcttcttatcaatttctaataaatctgaaccatcatctgtcccattttgaatatccctgtgttctttgatctcttttgtaagtcggtcgattctttcggttttataaacagaatccctttccaaagtcctaatcttactgagtttatcactaagttctgcattcaattcggtgagttttctcttggcttcttccaactctgttttaaactctccactatttccgcattcttcctcgcatttatctaaccattcaattagtttattaataactagttggtaatcagcgattcctatagccgttcttgtaattgtgggaacataattaggatcttctaatggattgtatggcttgatagcatcatctttatcattattagggggatggacaaccttaattggttggtcctcatctcctccagtagcgtgtggttcttcaataccagtgttagtaataggcttaggcaaatgcttgtcgtacgcgggcacttcctcatccatcaagtatttataatcgggttctacttcagaatattcttttctaagagacgcgacttcgggagttagtagaagaactctgtttctgtatctatcaacgctggaatcaatactcaagttaaggatagcgaatacctcatcgtcatcatccgtatcttctgaaacaccatcatatgacatttcatgaagtctaacgtattgataaatagaatcagatttagtattaaacagatccttaacctttttagtaaacgcatatgtatattttagatctccagatttcataatatgatcacatgccttaaatgtcagtgcttccatgatataatctggaacactaatgggtgacgaaaaagatacagcaccatatgctacgttgataaataaatctgaaccactaagtagataatgattaatgttaagaaagaggaaatattcagtgtataggtatgtcttggcgtcatatcttgtactaaacacgctaaacagtttgttaatgtgatcaatttccaatagattaattagagcagcgggaataccaacaaacatattaccacatccgtattttctatgaatatcacatatcatgttaaaaaatcttgatagaagagcgaatatctcgtctgacttaatgagtcgtagttcagcagcaacataagtcataactgtaaatagaacatactttcctgtagtgttgattctagactccacatcaacaccattattaaaaatagttttatatacatctttaatctgctctccgttaatcgtcgaacgttctagtatacggaaacactttgatttcttatctgtagttaatgacttagtgatatcacgaagaatattacgaattacatttcttgtttttcttgagagacctgattcagaactcaactcatcgttccatagtttttctacctcagtggcgaaatctttggagtgcttggtacatttttcaataaggttcgtgacctccatttattataaaaaatttattcaaaacttaactacaatcgggtaattataagatcgtagatctcccatgtggcggaatactaccatctatcgcatgtggatggacagtaggtaatggccatgggaacagtaatgtttgcatatttatctttcttgctagtattactgcatattgtcccaatgtttcgatgtgatgttctaacctatcaactgccgctgtatcacaacaatagtgtccgatgaaattaagattatgatccaatgtgtttaatatatgattatcaagtcttatacgatccgcgtcttttttgacaggatcaggttcttctacaggaagaagtttcggcctcttatgatattcatgtctgggaaacggtggtctagggtgaggctccggtatcggagtgggttttggattataatcatcatcgtctatgacatcatcttcgacttcgatatttattttgctatcttgatgatgtcctgtatcagttgcattttcagcactcgactgaatattagcgcattcattgtctattattaccatatttctaaacccaaaatgtatgtgttgaacatcagtactatcgttgatgagtcttatagcatgaattcgcttatcgttatcgggtttatcttctgtcaccttagcaattccttttttattaaactctacataatcatatccatttctattgtttgttctaatataaacgagtatagcatcattgctaaatttttcaatagtatcaaaaacagaatatcctaaaccatataatatatattcaggaacactcaaactaaatgtccaggattctcctaaatacgtaaactttaatagtgcgaaatcattcaaaaatctaccacttatagatagatagtacataaatgcgtatagtagtctacctatctctttattatgaaaaccggcattacgatcatatatgtcgtgatatacctgtgatccgtttacgttaaaccataaatacatgggtgatcctataaacatgaatttatttctaattctcagagctatagttaattgaccgtgtaatatttgcttacatgcatacttgatacgcttattaataagatttttatcattgctcgttatttcagaatcgtatatataaggagtaccatcgtgattcttaccagatattatacaaaatactatatataaaatatattgacccacgttagtaatcatataaatgtttaacgttttaaattttgtattcaatgatccattatcatacgctatcatggtcttgtaatattcattctttaaaatataatattgtgttagccattgcattggagctcctaatggagattttctattctcatccattttaggataggctttcataaagtccctaataacttcgtgaataatgtttctatgttttctactgatgcatgtatttgcttcgatttttttatcccatgtttcatctatcatagatttaaacgcagtaatgctcgcaacattaacatcttgaaccgttggtacaattccgttccataaatttataatgttcgccatttatataactcattttttgaatatacttttaattaacaaaagagttaagttactcatatggacgccgtccagtctgaacatcaatctttttagccagagatatcatagccgctcttagagtttcagcgtgattttccaacctaaatagaacttcatcgttgcgtttacaacacttttctatttgttcaaactttgttgttacattagtaatctttttttccaaattagttagccgttgtttgagagtttcctcattgtcgtcttcatcggctttaacaattgcttcgcgtttagcctctggctttttagcagcctttgtagaaaaaaattcagttgctggaattgcaagatcgtcatctccggggaaaagagttccgtccatttaaagtacagattttagaaactgacactctgcgttatttatatttggtacaacacatggattataaatattgatgttaataacatcagaaaatgtaaagtctatacattgttgcatcgtgttaaattttctaatggatctagtattattgggtccaacttctgcctgaaatccaaatatggaagcggatacaaaaccgtttcctggataaaccacacatctccacttttgctttacatcagaaattgtgtcgttgacatcttgaactctcctatctaatgccggtgttccacctatagattttgaatattcgaatgctgcatgagtagcattaaattccttaatattgccataattttcatatattgagtaaccctggataaaaagtaaacacaccgcagccgtcgctaccacaataaaaaaaattgatagagagttcatttataatctattagaagctgacaaaatttttttacacgcatcagacaatgctttaataaatagttcaacatctacttttgtcatatcgaaccgatggtatgattctaacctagaattacatccgaaaaagttgactatgttcatagtcattaagtcattaacaaacaacattccagactctggattataagacgatactgtttcgtcacaattacctaccttaatcatgtgattatgaatattggctattagagcaccttctaagaaatctataatatctttgaaacacgatttaaaatcaaaccacgaatatacttctacgaagaaagttagtttacccataggagaaataactataaatggagatctaaatacaaaatccggatctatgatagttttaacattattatattctctattaaatacctccacatctaaaaatgttaattttgaaactatgtcttcgtttattaccgtacctgaactaaacgctataagctctattgtttgagaactctttaaacgatattcttgaaatacatgtaacaaagtttcctttaactcggtcggtttatctaccatagttacagaatttgtatccttatctataatataataatcaaaatcgtataaagttatataattatcgcgttcagattgtgatcttttcaaatagactaaaaaccccatttctctagtaagtatcttatgtatatgtttgtaaaatatcttcatggtgggaatatgctctaccgcagttagccattcctcattgacagcggtagatgtattagacaaaactattccaatgtttaacaagggccattttacgagattattaaatccttgtttgataaatgtagccaatgagggttcgagttcaacgacgattgaattctcttcccgcggatgctgcatgatgaacgacgggatgttgttcgattgatttggaattctttttcgactttttgtttatattaaatattttaaaatttatagcggatagcaattcatgtaccacggataatgtagacgcgtattgcgcatcgatatctttattattagataaatttatcaataaatgtgagaagtttgcctcgttaaggtcttccatttaaatattatataaacatttgtgtttgtatcttattcgtcttttatggaatagttttttactagtaaagctgcaattacacactttgtccgtaaaacataaatataaacaccagcttttatcaatcgttccaaaaagtcgacggcggacatttttaacatggcatctattttaaatacacttaggtttttggaaaaaacatcattttataattgtaacgattcaataactaaagaaaagattaagattaaacataagggaatgtcatttgtattttataagccaaagcattctaccgttgttaaatacttgtctggaggaggtatatatcatgatgatttggttgtattggggaaggtaacaattaataatctaaagatgatgctattttacatggatttatcatatcatggagtgacaagtagtggagcaatttacaaattgggatcgtctatcgatagactttctctaaataggactattgttacaaaagttaataattatgatgatacattttttgacgacgatgattgatcgctattgcacaattttgtttttgtactttctaatatagtgtttaggttctttttcatatgagaatattgatttactaaaatatctatgtttaacttttgttctatgacgtccttatcggcggtatcggtacatatacgtaattcaccttcacaaaatacggagtcttcgataataatagccaatcgattattggatctagctgtctgtatcatattcaacatgtttaatatatcctttcgtttcccctttacaggcatcgatcgtagcatattttccgcgtctgatatggaaatgttaaaactacaaaaatgcgtaatgttagcccgtcctaatattggtacgtgtctataagtttggcatagtagaataatagacgtgtttaaatgccttccaaagtttaagaattctattagagtattgcattttgatagtttatcgcctacatcatcaaaaataagtaaaaagtgtgctgattttttatgattttgtgcgacagcaatacatttttctatgttacttttagttcgtatcagattatattctagagattcctgactactaacgaaattaatatgatttggccaaatgtatccatcataatctgggttataaacgggtgtaaacaagaatatatgtttatattttttaactagtgtagaaaacagagatagtaaatagatagtttttccagatccagatcctcctgttaaaaccattctaaacggcatttttaataaattttctcttgaaaattgtttttcttggaaacaattcataattatatttacagttactaaattaatttgataataaatcaaaatatggaaaactaaggttgttagtagggaggagaacaaagaaggcacatcgtgatataaataacatttattatcatgatgacaccagaaaacgacgaagagcagacatctgtgttctccgctactgtttacggagacaaaattcagggaaagaataaacgcaaacgcgtgattggtctatgtattagaatatctatggttatttcactactatctatgattaccatgtccgcgtttctcatagtgcgcctaaatcaatgcatgtctgctaacgaggctgctattactgacgccgctgttgccgttgctgctgcatcatctactcatagaaaggttgcgtctagcactacacaatatgatcacaaagaaagctgtaatggtttatattaccagggttcttgttatatattacattcagactaccagttattctcggatgctaaagcaaattgcactgcggaatcatcaacactacccaataaatccgatgtcttgactacctggctcattgattatgttgaggatacatggggatctgatggtaatccaattacaaaaactacatccgattatcaagattctgatgtatcacaagaagttagaaagtatttttgtgttaaaacaatgaactaatatttatttttgtacattaataaatgaaatcgcttaatagacaaactgtaagtaggtttaagaagttgtcggtgccggccgctataatgatgatactctcaaccattattagtggcataggaacatttctgcattacaaagaagaactgatgcctagtgcttgcgccaatggatggatacaatacgataaacattgttatttagatactaacattaaaatgtctacagataatgcggtttatcagtgtcgtaaattacgagctagattgcctagacctgatactagacatctgagagtattgtttagtattttttataaagattattgggtaagtttaaaaaagaccaatgataaatggttagatattaataatgataaagatatagatattagtaaattaacaaattttaaacaactaaacagtacgacggatgctgaagcgtgttatatatacaagtctggaaaactggttaaaacagtatgtaaaagtactcaatctgtactatgtgttaaaaaattctacaagtgacaacaaaaaatgaattaataataagtcgttaacgtacgccgccatggacgccgcgtttgttattactccaatgggtgtgttgactataacagatacattgtatgatgatctcgatatctcaatcatggactttataggaccatacattataggtaacataaaaactgtccaaatagatgtacgggatataaaatattccgacatgcaaaaatgctactttagctataagggtaaaatagttcctcaggattctaatgatttggctagattcaacatttatagcatttgtgccgcatacagatcaaaaaataccatcatcatagcatgcgactatgatatcatgttagatatagaagataaacatcagccattttatctattcccatctattgatgtttttaacgctacaatcatagaagcgtataacctgtatacagctggagattatcatctaatcatcaatccttcagataatctgaaaatgaaattgtcgtttaattcttcattctgcatatcagacggcaatggatggatcataattgatgggaaatgcaatagtaattttttatcataaaagttgtaaagtaaataataaaacaataaatattgaactagtagtacgtatattgagcaatcagaaatgatgctggtacctcttatcacggtgaccgtagttgcgggaacaatattagtatgttatatattatatatttgtaggaaaaagatacgtactgtctataatgacaataaaattatcatgacaaaattaaaaaagataaagagttctaattccagcaaatctagtaaatcaactgatagcgaatcagactgggaggatcactgtagtgctatggaacaaaacaatgacgtagataatatttctaggaatgagatattggacgatgatagcttcgctggtagtttaatatgggataacgaatccaatgttatggcgcctagcacagaacacatttacgatagtgttgctggaagcacgctgctaataaataatgatcgtaatgaacagactatttatcagaacactacagtagtaattaatgaaacggagactgttgaagtacttaatgaagataccaaacagaatcctaactattcatccaatcctttcgtaaattataataaaaccagtatttgtagcaagtcaaatccgtttattacagaacttaacaataaatttagtgagaataatccgtttagacgagcacatagcgatgattatcttaataagcaagaacaagatcatgaacacgatgatatagaatcatcggtcgtatcattggtgtgattagtttcctttttataaaattgaagtaatatttagtattattgctgccgtcacgttgtacaaatggagatattccctgtattcggcatttctaaaattagcaattttattgctaataatgactgtagatattatatagatacagaacatcaaaaaattatatctgatgagatcaatagacagatggatgaaacggtacttcttaccaacatcttaagcgtagaagttgtaaatgacaatgagatgtaccatcttattcctcatagattatcgacgattatactctgtattagttctgtcggaggatgtgttatctctatagataatgacatcaatggcaaaaatattctaacctttcccattgatcatgctgtaatcatatccccactgagtaaatgtgtcgtagttagcaagggtcctacaaccatattggttgttaaagcggatatacctagcaaacgattggtaacatcgtttacaaacgacatactatatgtaaacaatctgtcactgattaattatttgccgttgtctgtattcattattagacgagtcaccgactatttggatagacacatatgcgatcagatatttgctaataataagtggtattcccttataaccatcgacgataagcaatatcctattccatcaaactgtataggtatgtcctctgccaagtacataaattctagcatcgagcaagatactttaatccatgtttgtaacctcgagcatccgttcgactcagtatacaaaaaaatgcagtcgtacaattctctacctatcaaggaacaaatattgtacggtagaattgataatataaatatgagcattagtatttctgtggattaatagatttctagtatggggatcattaatcatctctaatctctaaatacctcataaaacgaaaaaaaagctattatcaaatactgtacggaatggattcattctcttctctttttatgaaactctgttgtatatctactgataaaactggaagcaaaaaatctgatagaaagaataagaataagatcaaggattatatggaacacgattattataaaataacaatagttcctggttcctcttccacgtctactagctcgtggtattatacacatgcctagtaatagtctctttgcgttgacggaaagcagactagaaataacaggctaaaatgttcagacaccataatagttcccaacccagataataacagagttccatcaacacattcctttaaactcaatcccaaacccaaaaccgttaaaatgtatccggccaattgatagtagataatgaggtgtacagcgcatgataatttacacagtaaccaaaatgaaaatactttagtaattataagaaatatagacggtaatgtcatcatcaacaatccgataatatgcctgagagtaaacattgacggataaaacaaaaatgctccgcataactctatcatggcaataacacaaccaaatacttgtaagattcctaaattagtagaaaatacaacgaatatcgatgtataagtgatctcgagaaataataagaataaagtaatgcccgtaaagataaacatcaacattgtttggtaatcattaaaccaattagtatgaagttgaactaatttcacagtagattttattccagtgttatcctcgcatgtataagtacctggtaagatatctttatattccataatcaatgagacatcactatctgataacgaatgaagtctagcactagtatgccatttacttaatattgtcgtcttggaagttttattataagttaaaatatcatggttatccaatttccatctaatatactttgtcggattatctatagtacacggaataatgatggtatcattacatgctgtatactctatggtctttgtagttgttataacaaccaacgtatagaggtatatcaacgatattctaactcttgacattttttatttatttaaaatgatacctttgttatttattttattctattttgctaacggtattgaatggcataagtttgaaacgagtgaagaaataatttctacttacttattagacgacgtattatacacgggtgttaatggggcggtatacacattttcaaataataaactaaacaaaactggtttaactaataataattatataacaacatctataaaagtagaggatgcggataaggatacattagtatgcggaaccaataacggaaatcccaaatgttggaaaatagacggttcagacgacccaaaacatagaggtagaggatacgctccttatcaaaatagcaaagtaacgataatcagtcacaacggatgtgtactatctgacataaacatatcaaaagaaggaattaaacgatggagaagatttgacggaccatgtggttatgatttattcacggcggataacgtaattccaaaagatggtttacgaggagcattcgtcgataaagacggtacttatgacaaagtttacattcttttcactgatactatcggctcaaagagaattgtcaaaattccgtatatagcacaaatgtgcctaaacgacgaaggtggtccatcatcattgtctagtcatagatggtcgacgtttctcaaagtcgaattagaatgtgatatcgacggaagaagttatagacaaattattcattctagaactataaaaacagataatgatacgatactatatgtattcttcgatagtccttattccaagtccgcattatgtacctattctatgaataccattaaacaatctttttctacgtcaaaattggaaggatatacaaagcaattgccgtctccagctcctggtatatgtttaccagctggaaaagttgttccacataccacgtttgaagtcatagaacaatataatgtactagatgatattataaagcctttatctaaccaacctatcttcgaaggaccgtctggtgttaaatggttcgatataaaggagaaggaaaatgaacatcgggaatatagaatatacttcataaaagaaaattctatatattcgttcgatacaaaatctaaacaaactcgtagctcgcaagtcgatgcgcgactattttcagtaatggtaactgcgaaaccgttatttatagcagatatagggataggagtaggaatgccacaaatgaaaaaaatacttaaaatgtaatcttaatcgagtacaccacacgacaatgaacaaacataagacagattatgctggttatgcttgctgcgtaatatgcggtctaattgtcggaattatttttacagcgacactattaaaagttgtagaacgtaaattagttcatacaccattaatagataaaacgataaaagatgcatatattagagaagattgtcctactgactggataagctataataataaatgtatccatttatctactgatcgaaaaacctgggaggaaggacgtaatgcatgcaaagctctaaattcaaattcggatctaattaagatagagactccaaacgagttaagttttttaagaagccttagacgaggctattgggtaggagaatccgaaatattaaaccagacaaccccatataattttatagctaagaatgccacgaagaatggaactaaaaaacggaaatatatttgtagcacaacgaatactcccaaactgcattcgtgttacactatataacaattacactacatttttatcataccactacttcggttagatgttttagaaaaaaataaatatcgccgtaccgttcttgtttttataaaaataacaattaacaattatcaaattttttctttaatattttacgtggttgaccattcttggtggtaaaataatctcttagtgttggaatggaatgctgtttaatgtttccacactcatcgtatattttgacgtatgtagtcacatcgtttacgcaatagtcagactgtagttctatcatgcttcctacatcagaaggaggaacagttttaaagtctcttggttttaatctattaccgttagttttcatgaaatcctttgttttatccacttcacattttaaataaatgtccactatacattcttttgttaattttactagatcgtcatgggtcatagaatttataggttccgtagtccatggatccaaactagcaaacttcgcgtatacggtatcgcgattagtgtatacaccaactgtatgaaaattaagaaaacagtttaataaatcaacagaaatatttaatcctccgtttgatacagatgcgccatatttatggatttcggattcacacgttgtttgtctgaggtgttcgtctagtgttgcttctacgtaaacttcgattcccatatattctttattgtcagaatcgcataccgatttatcatcatacactgtttgaaaactaaatggtatacacatcaaaataataaataataacgagtacattctgcaatattgttatcgtaattggaaaaatagtgttcgagtgagttggattatgtgagtattggattgtatattttattttatattttgtaataagaataaaatgctaatgtcaagtttattccaatagatgtcttattaaaaacatatataataaataacaatggctgaatggcataaaattatcgaggatatctcaaaaaataataagttcgaggatgccgccatcgttgattacaagactacaaagaatgttctagctgctattcctaacagaacatttgccaagattaatccgggtgaaattattcctctcatcactaatcgtaatattctaaaacctcttattggtcagaaatattgtattgtatatactaactctctaatggatgagaacacgtatgctatggagttgcttactgggtacgcccctgtatctccgatcgttatagcgagaactcataccgcacttatatttttgatgggtaagccaacaacatccagacgtgacgtgtatagaacgtgtagagatcacgctacccgtgtacgtgcaactggtaattaaaataaaaagtaatattcatatgtagtgtcaattttaaatgatgatgatgaaatggataatatccatattgacgatgtcaataatgccggtattggcatacagttcatcgatttttagatttcattcagaggatgtggaattatgttatgggcatttgtattttgataggatctataatgtagtaaatataaaatataatccgcatattccatatagatataattttattaatcgcacgttaaccgtagatgaactagacgataatgtcttttttacacatggttattttttaaaacacaaatatggttcacttaatcctagtttgattgtctcattatcaggaaacttaaaatataatgatatacaatgctcagtaaatgtatcgtgtctcattaaaaatttggcaacgagtacatctactatattaacatctaaacataagacttattctctacatcggtccacgtgtattactataataggatacgattctattatatggtataaagatataaatgacaagtataatgacatctatgattttactgcaatatgtatgctaatagcgtctacattgatagtgaccatatacgtgtttaaaaaaataaaaatgaactcttaattatgctatgctattagaaatggataaaatcaaaattacggttgattcaaaaattggtaatgttgttaccatatcgtataacttggaaaagataactattgatgtcacacctaaaaagaaaaaagaaaaggatgtattattagcgcaatcagttgctgtcgaagaggcaaaagatgtcaaggtagaagaaaaaaatattatcgatattgaagatgacgatgatatggatgtagaaagcgcgtaatacgatctataaaaataagtatataaatactttttatttactgtactcttactgtgtagtggtgataccctactcgattatttttttaaaaaaaaaatacttattctgattcttctagccatttccgtgttcgtttgaatgccacatcgacgtcaaagataggggagtagttgaaatctagttctgcattgttggtacgcacctcaaatgtagtgttggatatcttcaacgtatagttgttgagtagtgatggttttctaaatagaattctcttcatatcattcttgcacgcgtacatttttagcatccatcttggaatcctagatccttgttctattcccaatggtttcatcaatagaagattaaacatatcgtacgaacacgatggagagtaatcgtagcaaaagtaagcatttcctttaatcttagatcccggatactggatatattttgcagccaacacgtgcatccatgcagcatttcctacatatacccggctatgcaccgcgtcatcatcgactgtacgatacataatgttaccgtgttgcttacattgctcgtaaaagactttcatcaatttgtctccttctccgtaaattccagtgggtcttaggcaacaagtatacaattttgctccattcatgattacggaattattggctttcataaccagttgctcggccatacgtttactttttgcgtatacatgtcctggtgatatatcataaagggtatgctcatggccgatgaatggatcaccgtgtttattgggtcctattgcttccatgctactagtatagatcaaatacttgattcctaggtccacacaagctgccaaaatagtctgtgttccataatagtttactttcatgatttcattatcggtgtattttccaaatacatccactagagcagccgtatgaataatcagatttaccccatctagcgcttctctcaccttatcaaagtcgtttatatcacattgtatatagtttataaccttaactttcgaggttattggttgtggatcttctacaatatctatgactctgatttcttgaacatcatctgcactaattaacagttttactatatacctgcctagaaatccggcaccaccagtaaccgcgtacacggccattgctgccactcataatatcagactacttattctattttactaaataatggctgtttgtataatagaccacgataatatcagaggagttatttactttgaaccagtccatggaaaagataaagttttaggatcagttattggattaaaatccggaacgtatagtttgataattcatcgttacggagatattagtcaaggatgtgattccataggcagtccagaaatatttatcggtaacatctttgtaaacagatatggtgtagcatatgtttatttagatacagatgtaaatatatttacaattattggaaaggcgttatctatttcaaaaaatgatcagagattagcgtgtggagttattggtatttcttacataaatgaaaagataatacattttcttacaattaacgagaatggcgtttgatatatcagttaatgcgtctaaaacaataaatgcattagtttacttttctactcagcaaaataaattagtcatacgtaatgaagttaatgatacacactacactgtcgaatttgatagggacaaagtagttgacacgtttatttcatataatagacataatgacaccatagagataagaggggtgcttccagaggaaactaatattggttgcgcggttagtatgacttacttgtataataagtatagttttaaactgattttagcagaatatataagacacagaaatactatatccggcaatatttattcggcattgatgacactagatgatttggctattaaacagtatggagacattgatctattatttaatgagaaacttaaagtagactccgattcgggactatttgactttgtcaactttgtaaaggatatgatatgttgtgattctagaatagtagtagctctatctagtctagtatctaaacattgggaattgacaaataaaaaatataggtgtatggcattagccgaacatatatctgatagtattccaatatctgagctatctagactacgatacaatctatgtaagtatctacgcggacacactgagagcatagaggataaatttgattattttgaagacgatgattcgtctacatgttctgccgtaaccgacagggaaacggatgtataattttttttatagcgtgaaggatatgataaaaaatataattgttgtatttatcccattccaatcaccttatatgattctgtaacacaataaaggagtcttatagatgtatagaggtcagatactggtttgataaactgtttattccacataagtatgtttgactttatggttagacccgcatactttaacaaatcactgaaaattggagttaggtattgacctctcagaatcagttgccgttctggaacattaaatgtattttttatgatatactccaacgcatttatgtgggcatacaacaagtcattactaatggaatattccaagagttttagttgtctagtatttaacaagagaagagatttcaacagactgtttatgaactcgaatgccgcctcattgtcgcttatattgatgatgtcgaattctcccaatatcatcaccgatgagtagctcatcttgttatcgggatccaagttttctaaagatgtcattaaaccctcgatcatgaatggatttatcatcatcgtttttatgttggacatgagcttagtccgtttgtccacatctatagaagatgatttctgaattatttcatatatctctctctttaactccaggaacttgtcaggatggtctactttaatatgttctcgtctaagagatgaaaatctttggatggttgcacgcgacttttctctaaaggatgacgttgcccaagatcctctcttaaatgaatccatcttatccttggacaagatggacagtctattttccttagatggtttaatatttttgttacccatgatctataaaggtagacctaatcgtctcggatgaccatatatttattttcagttttattatacgcataaattgtaaaaaatatgttaggtttacgaaaatgtctcgtggggcattaatcgtttttgaaggattggacaaatctggaaaaacaacacaatgtatgaacatcatggaatcaataccttcaaacacaataaaataccttaactttcctcagagatccactgtcactggaaagatgatagatgactatctaactcgtaaaaaaacctataatgatcatatagttaatctattattttgtgcaaatagatgggagtttgcatcttttatacaagaacaactagaacagggaattactttaatagttgatagatacgcattttctggagtagcgtatgccgccgctaaaggcgcgtcaatgactctcagtaagagttatgaatctggattgcctaaacccgacttagttatattcttggaatctggtagcaaagaaattaatagaaacgtcggtgaggaaatttatgaagatgttacattccaacaaaaggtattacaagaatataaaaaaatgattgaagaaggagatattcattggcaaattatttcttctgaattcgaggaagatgtaaagaaggagttgattaagaatatagttatagaggctatacacacggttactggaccagtggggcaactgtggatgtaatagtgaaattacattttttataaatagatgttagtacagtgttataaatggatgaagcatattactctggcaacttggaatcagtactcggatacgtgtccgatatgcataccgaactcgcatcaatatctcaattagttattgccaagatagaaactatagataatgatatattaaacaaggacattgtaaattttatcatgtgtagatcaaacttggataatccatttatctctttcctagatactgtatatactattatagatcaagagaactatcagactgagttgattaattcattagacgacaatgaaattatcgattgtatagttaataagtttatgagcttttataaggataacctagaaaatatagtagatgctatcattactctaaaatatataatgaataatccagattttaaaactacgtatgccgaagtactcggttccagaatagccgatatagatattaaacaagtgatacgtaagaatatactacaattgtctaataatatccgcgaacgatatttgtgaaaatattaaaaaaaaatactttttttattaaatgacgtcttttcgtgaatttagaaaattatgctgtgctatatatcacgcatcaggatataaagaaaaatctaaattaattagagactttataacagatagggatgataaatatttgatcattaagctattgcttcccggattagacgatagaatttataacatgaacgataaacaaattataaaattatatagtataatatttaaacaatctcaggaagatatgctacaagatttaggatacggatatataggagacactattaggactttcttcaaagagaacacagaaatccgtccacgagataaaagcattttaactttagaagaagtggatagttttttaactacgttatcatccgtaactaaagaatcgcatcaaataaaattattgactgatgtagcatctgtttgtacatgtaatgatttaaaatgtgtagtcatgcttattgataaagatctaaaaattaaagcgggtcctcggtacgtacttaacgctattagtcctaatgcctatgatgtgtttagaaaatctaataacttgaaagagataatagaaaattcatctaaacaaaatctagactctatatctatttctgttatgactccaattaatcccatgttagcggaatcgtgtgattctgtcaataaggcgtttaaaaaatttccatcaggaatgtttgcggaagtcaaatacgatggtgaaagagtacaagttcataaaaataataacgagtttgccttctttagtagaaacatgaaaccagtactctctcataaagtggattatctcaaagaatacataccgaaagcatttaaaaaagctacgtctatcgtattggattctgaaattgttcttgtagacgaacataatgtaccgctcccgtttggaagtttaggtatacacaaaaagaaagaatataaaaactctaacatgtgtttgttcgtgtttgactgtttgtactttgatggattcgatatgacggacattccattgtacgaacgaagatcttttctcaaagatgttatggttgaaatacccaatagaatagtattctcagagttgacgaatattagtaacgagtctcagttaactgacgtattggatgatgcactaacgagaaaattagaaggattggtcttaaaagatattaatggagtatacgaaccgggaaagagaagatggttaaaaataaagcgagactatttgaacgagggttccatggcagattctgccgatttagtagtactaggtgcctactatggtaaaggagcaaagggtggtatcatggcagtctttctaatgggttgttacgacgatgaatccggtaaatggaagacggttaccaagtgttcaggacacgatgataatacgttaagggagttgcaagaccaattaaagatgattaaaattaacaaggatcccaaaaaaattccagagtggttagtagttaataaaatctatattcccgattttgtagtagaggatccgaaacaatctcagatatgggaaatttcaggagcagagtttacatcttccaagtcccataccgcaaatggaatatccattagatttcctagatttactaggataagagaggataaaacgtggaaagaatctactcatctaaacgatttagtaaacttgactaaatcttaatagttacatacaaactgaaaattaaaataacactatttagttggtggtcgccatggatggtgttattgtatactgtctaaacgcgctagtaaaacatggcgaggaaataaatcatataaaaaatgatttcatgattaaaccatgttgtgaaagagtttgtgaaaaagtcaagaacgttcacattggcggacaatctaaaaacaatacagtgattgcagatttgccatatatggataatgcggtatccgatgtatgcaattcactgtataaaaagaatgtatcaagaatatccagatttgctaatttgataaagatagatgacgatgacaagactcctactggtgtatataattattttaaacctaaagatgccattcctgttatcatatctataggaaaggataaagatgtctgtgaactattaatctcatcagacatatcgtgtgcatgcgtggagttaaattcatatcacgtagccattcttcccatggatgtttccttttttaccaaaggaaatgcatcattgattattctcctgtttgatttctctatcgatgcggcacctctcttaagaagtgtaaccgataataatgttattatatctagacaccagcgtctacatgacgagcttccgagttccaattggttcaagttttacataagtataaagtccgactattgttctatattatatatggttgttgatggatctgtgatgcatgcgatagctgataatagaactcacgcaattattagcaaaaatatattagacaatactacgattaacgatgagtgtagatgctgttattttgaaccacagattaggattcttgatagagatgagatgctcaatggatcatcgtgtgatatgaacagacattgtattatgatgaatttacctgatgtaggcgaatttggatctagtatgttggggaaatatgaacctgacatgattaagattgctctttcggtggctggtaatttaataagaaatcgagactacattcccgggagacgaggatatagctactacgtttacggtatagcctctagataatttttttaagcacgaaataaaaaacataattttaaaccaatctatttcatactattttgtgtgatcaccatggacataaagatagatattagtatttctggtgataaatttacggtgactactaggagggaaaatgaagaaagaaaaaaatatctacctctccaaaaagaaaaaactactgatgttatcaaacctgattatcttgagtacgatgacttgttagatagagatgagatgtttactattctagaggaatattttatgtacagaggtctattaggcctcagaataaaatatggacgactctttaacgaaattaaaaaattcgacaatgatgcggaagaacaattcggtactatagaagaactcaagcagaaacttagattaaattctgaagagggagcagataactttatagattatataaaggtacaaaaacaggatatcgtcaaacttactgtatacgattgcatatctatgataggattgtgtgcatgcgtggtagatgtttggagaaatgagaaactgttttctagatggaaatattgtttacgagcgattaaactgtttattgatgatcacatgcttgataagataaaatctatactgcagaatagactagtatatgtggaaatgtcatagaaagttaaaagttaatgagagcaaaaatatataaggttgtattccatatttgttatttttttctgtaatagttagaaaaatacattcgatggtctatctatcagattattatgtgttataaggtactttttctcataataaactagagtatgagtaagatagtgtttttcaaaacatataaatctaaaattgatggatgagatatacagctattaatttcgaaaatatattttaatctgataactttaaacatggatttttaatggtggtttaacgttttaaaaaaagattttgttattgtagtatatgataatattaaaagatggatataaagaatttgctgactgcatgtactattttttacattactacattggctacggcagatatacctacttcgtcactgccacacgctccggtaaacggggcatgtgacgagggagaatatcttgataagaggcataatcaatgttgtaatcagtgtccacctggagaatttgccaaggttagatgtaatggtaacgataacacaaaatgtgaacgctgcccacctcatacatataccgcaatccccaattactctaatggatgtcatcaatgtagaaaatgcccaacaggatcatttgataaggtaaagtgtaccggaacacagaacagtaaatgttcgtgtcttcctggttggtattgcgctactgattcttcacagactgaagattgtcgagattgtataccaaaaaggagatgtccatgcggatactttggtggaatagatgaacaaggaaatcctatttgtaaatcgtgttgtgttggtgaatattgcgactacctacgtaattatagacttgatccatttcctccatgcaaactatctaaatgtaattaattatgattttgatgataatgttaccatacattatatcgctacttggttagtgtattattcagtatgaagacctattaataattacttatcttttgacgatcttgttataattataatataaaaatacttatggcatagtaactcataattgctgacgcgataaattcgtaataatctgttttgttcaaatttttataaggaatctacaggcataaaaataaaaatataatttataatatactcttacagcgcgccatcatgaataacagcagtgaattgattgctgttattaatggatttagaaatagtggacgattttgtgatattaatatagttattaatgatgaaaggataaacgctcacagactcatcctatctggagcctccgaatatttttccattctgttttccaataattttatcgattctaatgaatacgaagttaatctaagtcatttagattatcaaagtgttaacgatttgatcgattacatttatgggatacctttgagcctaactaacgataacgtgaaatatattctttcaaccgctgattttttacaaattggatctgctattacggagtgtgaaaattacatacttaaaaatctttgttctagaaactgtatcgatttctacatatacgctgataaatataataacaagaaaatagaatcagcgtcgtttaacacaatattacaaaatattttgagactcatcaacgatgaaaactttaaatacttaacagaggaatcaatgataaaaattttaagcgatgatatgttaaatataaaaaatgaggatttcgccccactaattctcattaaatggttagagagtactcaacaaccatgcaccgtcgagttacttaaatgcctcagaatatcattgctttccccacaagttataaaatcactttatagtcatcgactggttagttcaatctacgaatgtataacattcttaaacaatatagcattcttggatgaatcatttcctagataccatagcatcgagttgatatctatcggtataagtaattcgcatgataagatttccataaactgctacaatcataaaaaaaatacatgggaaatgatatcttcacgtagatataggtgtagtttcgcagtggccgtcctggataatattatctatatgatgggtggatatgatcagtccccgtatagaagttcaaaggttatagcgtacaatacatgtacaaattcttggatatatgatataccagagctaaaatatcctcgttctaattgtgggggactggctgatgacgaatacatttattgtataggcggcatacgcgatcaggattcatcgttgacatctagtattgatagatggaagccatcaaaaccatattggcagaagtatgctaaaatgcgcgaaccaaaatgtgatatgggggttgcgatgttaaacggattaatatatgttataggtggaatcgttaaaggtgacacgtgtaccgacgcactagagagtttatcagaagatggatggatgaagcatcaacgtcttccaataaaaatgtccaatatgtcgacgattgttcatgatggcaagatttatatatctggaggttacaacaatagtagtgtagttaatgtaatatcgaatctagtccttagctataattcgatatatgatgaatggaccaaattatcatcattaaacattcctagaattaatcccgctctatggtcagcgcataataaattatatgtaggaggaggaatatctgatgatgttcgaactaatacatctgagacatacgacaaagaaaaagattgttggacattggataatggtcacgtgttaccacgcaattatataatgtataaatgcgaaccgattaaacataaatatccattggaaaaaacacagtacacgaatgattttctaaagtatttggaaagttttataggtagttgatagaacaaaatacataattttgtaaaaataaatcactttttatactaatatgacacgattaccaatacttttgttactaatatcattagtatacgctacaccttttcctcagacatctaaaaaaataggtgatgatgcaactctatcatgtaatcgaaataatacaaatgactacgttgttatgagtgcttggtataaggagcccaattccattattcttttagctgctaaaagcgacgtcttgtattttgataattataccaaggataaaatatcttacgactctccatacgatgatctagttacaactatcacaattaaatcattgactgctagagatgccggtacttatgtatgtgcattctttatgacatcaactacaaatgacactgataaagtagattatgaagaatactccacagagttgattgtaaatacagatagtgaatcgactatagacataatactatctggatctacacattcaccggaaactagttctgagaaacctgattatatagataattctaattgctcgtcggtattcgaaatctaagctcaaaaattgaaaaactagcgtctttttttgctcgaagtcgaccaccatggtgggtgaggatagcgtgctgatcaccgagaacatgcacatgaaactgtacatggagggcaccgtgaacgaccaccacttcaagtgcacatccgagggcgaaggcaagccctacgagggcacccagaccatgaagatcaaggtggtcgagggcggccctctccccttcgccttcgacatcctggctaccagcttcatgtacggcagcaaaacctttatcaaccacacccagggcatccccgacttctttaagcagtccttccctgagggcttcacatgggagaggatcaccacatacgaagacgggggcgtgctgaccgctacccaggacaccagcctccagaacggctgcctcatctacaacgtcaagatcaacggggtgaacttcccatccaacggccctgtgatgcagaagaaaacactcggctgggaggccagcaccgagatgctgtaccccgctgacagcggcctgagaggccatagccagatggccctgaagctcgtgggcgggggctacctgcactgctccctcaagaccacatacagatccaagaaacccgctaagaacctcaagatgcccggcttctacttcgtggacaggagactggaaagaatcaaggaggccgacaaagagacctacgtcgagcagcacgagatggctgtggccaggtactgcgacctgcctagcaaactggggcacagctgattaattaatttttatcgatctaattcaacaatgtctggagagcttcgcaggatcccgactccggaaccaattactgataaagaagatcatacagttacagacactgtctcatacactacagtaagtacatcatctggaattgtcactactaaatcaaccaccgatgatgcggatctttatgatacgtacaatgataatgatacagtaccaccaactactgtaggcggtagtacaacctctattagcaattataaaaccaaggactttgtagaaatatttggtattaccgcattaattatattgtcggccgtggcaattttctgtattacatattatatatataataaacgttcacgtaaatacaaaacagagaacaaagtctagatttttgacttacataaatgtctgggatagtaaaatctatcatattgagcggaccatctggtttaggaaagacagccatagccaaaagactatgggaatatatttggatttgtggtgtcccataccactagatttcctcgtcctatggaacgagaaggtgttgattaccattacgttaacagagaggccatctggaagggaatagccgccggaaactttctagaacatactgagtttttaggaaatatttacggaacttctaaaacagctgtgaatacagcggctattaataatcgtatttgtgtgatggatctaaacatcgacggtgttagaagtcttaaaaatacgtacctaatgccttactcggtgtatataagacctacctctcttaaaatggttgagaccaagcttcgtcgtagaaacactgaagctaacgatgagattcatcgtcgtgtgatgttggcaaaaactgacatggatgaggcaggtgaagccggtctattcgacactattatcattgaagatgatgtgaatttagcatatagtaagttaattcagatactacaggaccgtattagaatgtattttaacactaattagagacttaagacttaaaacttgataattaataatataactcgtttttatatgtgtctatttcaacgtctaatgtattagttaaatattaaaacttaccacgtaaaacttaaaatttaaaatgatatttcattgacagatagatcacacattatgaactttcaaggacttgtgttaactgacaattgcaaaaatcaatgggtcgttggaccattaataggaaaaggtggattcggtagtatttatactactaatgacaataattatgtagtaaaaatagagcccaaagctaacggatcattatttaccgaacaggcattttatactagagtacttaaaccatccgttatcgaagaatggaaaaaatctcacaatataaagcacgtaggtcttatcacgtgcaaggcatttggtctatacaaatccattaatgtggaatatcgattcttggtaattaatagattaggtgcagatctagatgcggtgatcagagccaataataatagactaccaaaaaggtcggtgatgttgatcggaatcgaaatcttaaataccatacaatttatgcacgagcaaggatattctcacggagatattaaagcgagtaatatagtcttagatcaaatagataagaataaattatatctagtggattacggattggtttctaaattcatgtctaatggcgaacatgttccatttataagaaatccaaataaaatggataacggtactctagaatttacacctatagattcgcataaaggatacgttgtatctagacgtggagatctagaaacacttggatattgtatgattagatggttgggaggtatcttaccatggactaagatatctgaaacaaagaattgtgcattagtaagtgccacaaaacagaaatatgttaacaatactgcgactttgttaatgaccagtttgcaatatgcacctagagaattgctgcaatatattaccatggtaaactctttgacatattttgaggaacccaattacgacaagtttcggcacatattaatgcagggtgtatattattaagtgtggtgtttggtcgataaaaattaaaaaataacttaatttattattgatctcgtgtgtacaaccgaaatcatggcgatgttttacgcacacgctctcggtgggtacgacgagaatcttcatgcctttcctggaatatcatcgactgttgccaatgatgtcaggaaatattctgttgtgtcagtttataataacaagtatgacattgtaaaagacaaatatatgtggtgttacagtcaggtgaacaagagatatattggagcactgctgcctatgtttgagtgcaatgaatatctacaaattggaaatccgatccatgatcaagaaggaaatcaaatctctatcatcacatatcgccacaaaaactactatgctctaagcggaatcgggtacgagagtctagacttgtgtttggaaggagtagggattcatcatcacgtacttgaaacaggaaacgctgtatatggaaaagttcaacatgattattctactatcaaagagaaggccaaagaaatgagtgcacttagtccaggacctatcatcgattaccacgtctggataggagattgtatctgtcaagttactgctgtggacgtacatggaaaggaaattatgaaaatgagattcaaaaagggtgcggtgcttccgatcccaaatctggtaaaagttaaacttggggagaatgatacagaaaatctttcttctactatatcggcggcaccatcgaggtaaccacctctctggaagacagcgtgaatcatgtactcatgaaacgtttggaaactatacgccatatgtggtctgttgtatatgatcattttgatattgtgaatggtaaagaatgctgttatgtgcatacgcattcatctaatcaaaatcctataccgagtactgtaaaaacaaatttgtacatgaagactatgggatcatgcattcaaatggattccatggaagctctagagtatcttagcgaactgaaggaatcaggtggatggagtcccagaccagaaatgcaggaatttgaatatccagatggagtggaagacactgaatcaattgagagattggcagaggagttcttcaatagatcagaacttcaggctggtgaatcagtcaaatttggtaattctattaattgttaaacatacatctgtttcagctaagcaactaagaacacgtatacggcagcagcttccttctatactctcatcttttaccaacacaaagggtggatatttgttcattggagttgataataatacacacaaagtatttggattcacggtgggttacgactacctcagactgatagagaatgatatagaaaagcatatcaaaagacttcgtgttgtgcatttctgtgagaagaaagaggacatcaagtacgcgtgtcgattcatcaaggtatataaacctggggatgagactacctcgacatacgtgtgcgctatcaaagtggaaagatgctgttgtgctgtgtttgcagattggccagaatcatggtatatggatactaatggtatcaagaagtattctccagatgaatgggtgtcacatataaaattttaattaatgtaactatagagaacaaataataaggttgtaatatcatatagacaataactaacaattaattagtaactgttatctcttttttaactaaccaactaactatatacctattaatacatcgtaattatagttcttaacatctattaatcattaattcgcttctttaattttttataaactaacattgttaattgaaaagggataacatgttacagaatataaattatatatggatttttttaaaaaggaaatacttgactggagtatatatttatctcttcattatatagcacgcgtgttttccaatttttccacatcccatataatacaggattataatctcgttcgaacatacgagaaagtggataaaacaatagttgattttttatctaggttgccaaatttattccatattttagaatatggggaaaatattctacatatttattctatggatgatgctaatacgaatattataattttttttctagatagagtattaaatattaataagaacgggtcatttatacacaatctcgggttatcatcatccattaatataaaagaatatgtatatcaattagttaataatgatcatccagataataggataagactaatgcttgaaaatggacgtagaacaagacattttttgtcctatatatcagatacagttaatatctatatatgtattttaataaatcatggattttatatagatgccgaagacagttacggttgtacattattacatagatgtatatatcactataagaaatcagaatcagaatcatacaatgaattaattaagatattgttaaataatggatcagatgtagataaaaaagatacgtacggaaacacaccttttatcctattatgtaaacacgatatcaacaacgtggaattgtttgagatatgtttagagaatgctaatatagactctgtagactttaatagatatacacctcttcattatgtctcatgtcgtaataaatatgattttgtaaagttattaatttctaaaggagcaaatgttaatgcgcgtaataaattcggaactactccattttattgtggaattatacacggtatctcgcttataaaactatatttggaatcagacacagagttagaaatagataatgaacatatagttcgtcatttaataatttttgatgctgttgaatctttagattatctattatccagaggagttattgatattaactatcgtactatatacaacgaaacatctatttacgacgctgtcagttataatgcgtataatacgttggtctatctattaaacaaaaatggtgattttgagacgattactactagtggatgtacatgtatttcggaagcagtcgcaaacaacaacaaaataataatggaagtactattgtctaaacgaccatctttgaaaattatgatacagtctatgatagcaattactaaacataaacagcataatgcagatttattgaaaatgtgtataaaatatactgcgtgtatgaccgattatgatactcttatagatgtacagtcgctacagcaatataaatggtatattttaagatgtttcgatgaaatagatatcatgaagagatgttatataaaaaataaaactgtattccaattagttttttgtatcaaagacattaatactttaatgagatacggtaaacatccttctttcgtgaaatgcactagtctcgacgtatacggaagtcgtgtacgtaatatcatagcatctattagatatcgtcagagattaattagtctattatccaagaagctggatcctggagataaatggtcgtgttttcctaacgaaataaaatataaaatattggaaaactttaacgataacgaactatccacatatctaaaaatcttataaacattattaaaatataaaatctaagtaggataaaatcacactacatcattgtttccttttagtgctcgacagtgtatactatttttaacgctcataaataaaaatgaaaacgatttccgttgttacgttgttatgcgtactacctgctgttgtttattcaacatgtactgtacccactatgaataacgctaaattaacgtctaccgaaacatcgtttaatgataaccagaaagttacgtttacatgtgatcagggatatcattctttggatccaaatgctgtctgtgaaacagataaatggaaatacgaaaatccatgcaaaaaaatgtgcacagtttctgattatgtctctgaactatataataaaccgctatacgaagtgaattccaccatgacactaagttgcaacggcgaaacaaaatattttcgttgcgaagaaaaaaatggaaatacttcttggaatgatactgttacgtgtcctaatgcggaatgtcaacctcttcaattagaacacggatcgtgtcaaccagttaaagaaaaatactcatttggggaatatatgactatcaactgtgatgttggatatgaggttattggtgcttcgtacataagttgtacagctaattcttggaatgttattccatcatgtcaacaaaaatgtgatatgccgtctctatctaacggattaatttccggatctacattttctatcggtggcgttatacatcttagttgtaaaagtggttttacactaacggggtctccatcatccacatgtatcgacggtaaatggaatcccatactcccaatatgtgtacgaactaacgaaaaatttgatccagtggatgatggtcccgacgatgagacagatttgagcaaactctcgaaagacgttgtacaatatgaacaagaaatagaatcgttagaagcaacttatcatataatcatagtggcgttgacaattatgggcgtcatatttttaatctccgttatagtattagtttgttcctgtgacaaaaataatgaccaatataagttccataaattgctaccgtaaatataaatccgttaaaataattaataatttaataacaaacaagtatcaaaagattaaagacttatagctagaatcaattgagatgtcttcttcagtggatgttgatatctacgatgccgttagagcatttttactcaggcactattataacaagagatttattgtgtatggaagaagtaacgccatattacataatatatacaggctatttacaagatgcgccgttataccgttcgatgatatagtacgtactatgccaaatgaatcacgtgttaaacaatgggtgatggatacacttaatggtataatgatgaatgaacgcgatgtttctgtaagcgttggcaccggaatactattcatggaaatgtttttcgattacaataaaaatagtatcaacaatcaactaatgtatgatataattaatagcgtatctataattctagctaatgagagatatagaagcgcttttaacgacgatggtatatacatccgtagaaatatgattaacaagttgtacggatacgcatctctaactactattggcacgatcgctggaggtgtttgttattatctgttgatgcatctagttagtttgtataaataattatttcaatatactagttaaaattttaagattttaaatgtataaaaaactaataacgtttttatttgtaataggtgcattagcatcctattcgaataatgagtacactccgtttaataaactgagtgtaaaactctatatagatggagtagataatatagaaaattcatatactgatgataataatgaattggtgttaaattttaaagagtacacaatttctattattacagagtcatgcgacgtcggatttgattccatagatatagatgttataaacgactataaaattattgatatgtataccattgactcgtctactattcaacgcagaggtcacacgtgtagaatatctaccaaattatcatgccattatgataagtacccttatattcacaaatatgatggtgatgagcgacaatattctattactgcagagggaaaatgctataaaggaataaaatatgaaataagtatgatcaacgatgatactctattgagaaaacatactcttaaaattggatctacttatatatttgatcgtcatggacatagtaatacatattattcaaaatatgatttttaaaaatttaaaatatattatcacttcagtgacagtagtcaaataacaaacaacaccatgagatatattataattctcgcagttttgttcattaatagtatacatgctaaaataactagttataagtttgaatccgtcaattttgattccaaaattgaatggactggggatggtctatacaatatatcccttaaaaattatggcatcaagacgtggcaaacaatgtatacaaatgtaccagaaggaacatacgacatatccgcatttccaaagaatgatttcgtatctttctgggttaaatttgaacaaggcgattataaagtggaagagtattgtacgggactatgcgtcgaagtaaaaattggaccaccgactgtaacattgactgaatacgacgaccatatcaatttgtacatcgagcatccgtatgctactagaggtagcaaaaagattcctatttacaaacgcggtgacatgtgtgatatctacttgttgtatacggctaacttcacattcggagattctaaagaaccagtaccatatgatatcgatgactacgattgcacgtctacaggttgcagcatagactttgtcacaacagaaaaagtgtgcgtgacagcacagggagccacagaagggtttctcgaaaaaattactccatggagttcgaaagtatgtctgacacctaaaaagagtgtatatacatgcgcaattagatccaaagaagatgttcccaatttcaaggacaaaatggccagagttatcaagagaaaatttaatacacagtctcaatcttatttaactaaatttctcggtagcacatcaaatgatgttaccacttttcttagcatgcttaacttgactaaatattcataactaatttttattaatgatacaaaaacgaaataaaactgcatattatacactggttaacgcccttataggctctaaccattttcaagatgaggtccctgattatagtccttctgttcccctctatcatctactccatgtctattagacgatgtgagaagactgaagaggaaacatggggattgaaaatagggttgtgtataattgccaaagatttctatcccgaaagaactgattgcagtgttcatctcccaactgcaagtgaaggattgataactgaaggcaatggattcagggatatacgaaacaccgataaattataaaaaaagcaatgtgtccgctgtttccgttaataatactattttcgtaactggcggattattcataaataactctaatagcacgatcgtggttaacaatatggaaaaacttgacatttataaagacaaacaatggtcgattatagaaatgcctatggctagggtatatcacggcattgactcgacatttggaatgttatattttgccggaggtctatccgttaccgaacaatatggtaatttagagaaaaacaacgagatatcttgttacaatcctagaacgaataagtggtttgatatttcatatactatttataagatatccatatcatcattgtgtaaactaaataacgtcttctatgtatttagtaaggacattggatatgtggaaaagtatgatggtgcatggaagttagtacatgatcgtctccccgctataaaggcattatcaacttctccttattgattgaaaatgaaaatataaatagtttttatgtatagcagtattaccctatagttttattgcttactactaacatggatacagatgttacaaatgtagaagatatcataaatgaaatagatagagagaaagaagaaatactaaaaaatgtagaaattgaaaataataaaaacattaacaagaatcatcccaatgaatatattagagaagcactcgttattaataccagtagtaatagtgattccattgataaagaagttatagaatgtatcagtcacgatgtaggaatatagatcatatctactaatttttataatcgatacaaaacataaaaaacaactcgttattacatagcaggcatggaatccttcaagtattgttttgataacgatggcaagaaatggattatcggaaatactttatattctggtaattcaatactctataaggtcagaaaaaatttcactagttcgttctacaattacgtaatgaagatagatcacaaatcacacaagccattgttgtctgaaatacgattctatatatctgtattggatcctttgactatcgacaactggacacgggaacgtggtataaagtatttggctattccagatctgtatggaattggagaaaccgatgattatatgttcttcgttataaagaattcgggaagagtattcgccccaaaggatactgaatcagtcttcgaagcatgcgtcactatgataaacacgttagagtttatacactctcgaggatttacccatggaaaaatagaaccgaggaatatactgattagaaataaacgtctttcactaattgactattctagaactaacaaactatacaagagtggaaactcacatatagattacaacgaggacatgataacttcaggaaatatcaattatatgtgtgtagacaatcatcttggagcaacagtttcaagacgaggagatttagaaatgttgggatattgcatgatagaatggttcggtggcaaacttccatggaaaaacgaaagtagtataaaagtaataaaacaaaaaaaagaatataaaaaatttatagctactttctttgaggactgttttcctgaaggaaatgaacctctggaattagttagatatatagaattagtatacacgttagattattctcaaactcctaattatgacagactacgtaaactgtttatacaagattgaaattatattcttttttttatagagtgtggtagtgttacggatatctaatattaatattagactatctctatcgcgctacacgaccaatatcgattactatggatatcttctatgaaaggagagaatgtatttatttctccagcgtcaatctcgtcagtattgacaatactgtattatggagctaatggatccactgctgaacagctatcaaaatatgtagaaacggaggagaacacggataaggttagcgctcagaatatctcattcaaatccatgaataaagtatatgggcgatattctgccgtgtttaaagattcctttttgagaaaaattggcgataagtttcaaactgttgacttcactgattgtcgcactatagatgcaatcaacaagtgtgtagatatctttactgaggggaaaatcaatccactattggatgaaccattgtctcctagcaattagtgccgtatactttaaagcaaaatggttgacgccattcgaaaaggaatttaccagtgattatcccttttacgtatctccgacggaaatggtagacgtaagtatgatgtctatgtacggcaaggcatttaatcacgcatctgtaaaagaatcattcggcaacttttcaatcatagaactgccatatgttggagatactagtatgatggtcattcttccagacaagattgatggattagaatccatagaacaaaatctaacagatacaaattttaagaaatggtgtgactttatggatgctatgtttatagatgttcacattcccaagtttaaggtaacaggctcgtataatctggtggatactctagtaaagtcaggactgacagaggtgttcggttcaactggagattatagcaatatgtgtaatttagatgtgagtgtcgacgctatgatccacaaaacgtatatagatgtcaatgaagagtatacagaagcagctgcagcaacttctgtactagtggcagactgtgcatcaacaattacaaatgagttctgtgcagatcatccgttcatctatgtgattaggcatgttgatggaaaaattcttttcgttggtagatattgctctccgacaactaattgttaaccattttttttaaaaaaaatagaaaaaacatgtggtattagtgcaggtcgttgttcttccaattgcaattggtaagatgacggccaactttagtacccacgtcttttcaccacagcactgtggatgtgacagactgaccagtattgatgacgtcaaacaatgtttgactgaatatatttattggtcgtcctatgcataccgcaacaggcaatgcgctggacaattgtattccacactcctctcttttagagatgatgcggaattagtgttcatcgacattcgcgagctggtaaaaaatatgccgtgggatgatgtcaaagattgtacagaaatcatccgttgttatataccggatgagcaaaaaaccatcagagagatttcggccatcatcggactttgtgcatatgctgctacttactggggaggtgaagaccatcccactagtaacagtctgaacgcattgtttgtgatgcttgagatgctaaattacgtggattataacatcatattccggcgtatgaattgatgagttgtacatcttgacattttctttcttctcttctccctttcttctcttctcccttcctccctcttctccctttcccagaaacaaacttttttacccactataaaataaaatgagtatactacctattatatttcttcctatatttttttattcttcattcgttcagacttttaacgcgtctgaatgtatcgacaaagggcaatattttgcatcattcatggagttagaaaacgagccagtaatcttaccatgtcctcaaataaatacgctatcatccggatataatatattagatattttatgggaaaaacgaggagcggataatgatagaattataccgatagataatggtagcaatatgctaattctgaacccgacacaatcagactctggtatttatatatgcattaccacgaacgaaacctactgtgacatgatgtcgttaaatttgacaatcgtgtctgtctcagaatcaaatatagatcttatctcgtatccacaaatagtaaatgagagatctactggcgaaatggtatgtcccaatattaatgcatttattgctagtaacgtaaacgcagatattatatggagcggacatcgacgccttagaaataagagacttaaacaacggacacctggaattattaccatagaagatgttagaaaaaatgatgctggttattatacatgtgttttagaatatatatacggtggcaaaacatataacgtaaccagaattgtaaaattagaggtacgggatagaataataccttctactatgcaattaccagatggcattgtaacttcaataggtagtaatttgactattgcatgcagagtatcgttgagacctcccacaacggacaccgacgtcttttggataagtaatggtatgtattacgaagaagatgatggggacggaaacggtagaataagtgtagcaaataaaatctatatgaccgataagagacgtgttattacatcccggttaaacattaatcctgtcaaggaagaagatgctacaacgtttacgtgtatggcgtttactattcctagcatcagcaaaacagttactgttagtataacgtgaatgtatgttgttacatttccatgtcaattgagtttataagaatttttatacattatcttccaacaaacaattgacgaacgtattgctatgattaactcccacgatactatgcatattattaatcattaacttgcagactatacctagtgctattttgacatactcgtgttcttgtgtaattgcggtatctatattattaaagtacgtaaatctagctatagttttattatttaattttagataatataccgtctccttatttttaaaaattgccacatcctttattaaatcatgaatgggaatttctatgtcatcgttagtatattgtgaacaacaagagcagatatctataggaaagggtggaatgcgatacattgatctatgtagttttaaaacacacgcgaactttgaagaatttatataaatcattccatcgatacatccttctatgttgacatgtatatatccaggaattcttttattaatgtcaggaaatgtataaactaaaacattgcccgaaagcggtgcctctatctgcgttatatccgttcttaacttacaaaatgtaaccaatacctttgcatgacttgttttgttcggcaacgttagtttaaacttgacgaatggattaattacaatagcatgatccgcgcatctattaagtttttttactttaacgcccttgtatgtttttacagagactttatctaaatttctagtgcttgtatgtgttataaatataacgggatatagaaccgaatcacctaccttagatacccaattacattttatcagatccagataataaacaaattttgtcgccctaactaattctatattgttatatattttacaattggttatgatatcatgtaataacttggagtctaacgcgcatcgtcgtacgtttatacaattgtgatttagtgtagtatatctacacatgtatttttccgcactatagtattctggactagtgataaaactatcgttatatctgtcttcaatgaactcatcgagatattgctctctgtcatattcatacacctgcataaactttctagacatcttacaatccgtgttattttaggatcatatttacatatttacgggtatatcaaagatgttagattagttaatgggaatcgtctataataatgaatattaaacaattatatgaggacttttaccacaaagcatcataaaaatgagtcgtcgtctgatttatgttttaaatatcaaccgcaaatcaactcataaaatacaagagaatgaaatatatacatattttagtcattgcaatatagaccatacttctacagaacttgattttgtagttaaaaactatgatctaaacagacgacaacctgtaactgggtatactgcactacactgctatttgtataataattactttacaaacgatgtactgaagatattattaaatcatgacgtaaatgtaacgatgaaaaccagtagcggacgtatgcctgtttatatattgcttactagatgttgtaatatttcacatgatgtagtgatagatatgatagacaaagataaaaaccacttattacatagagactattccaacctattactagagtatataaaatctcgttacatgttattgaaggaagaggatatcgatgagaacatagtatccactttattagataagggaatcgatcctaactttaaacaagacggatatacagcgttacattattattatttgtgtctcgcacacgtttataaactaggtgagtgtagaaaaccgataacgataaaaaaggccaagcgaattatttctttgtttatacaacatggagctaatctaaacgcgttagataattgtggtaatacaccattccatttgtatcttagtattgaaatgtgtaataatattcatatgactaaaatgctgttgacttttaatccgaatttcaaaatatgtaataatcatggattaacgcctatactatgttatataacttccgactacatacaacacgatattcttgttatgttaatacatcactatgaaacaaatgttggagaaatgccgatagatgagcgtcgtatgatcgtattcgagtttatcaaaacatattctacacgtccggcagattcgataacttatttgatgaataggtttaaaaatataaatatttatacccgctatgaaggaaagacattattacacgtagcatgtgaatataataatacacaagtaatagattatcttatacgtatcaacggagatataaatgcgttaaccgacaataacaaacacgctacacaactcattatagataacaaagaaaattccccatataccattaattgtttactgtatatacttagatatattgtagataagaatgtgataagatcgttggtggatcaacttccatctctacctatcttcgatataaaatcatttgagaaattcatatcctactgtatacttttagatgacacattttacgataggcacgttaagaatcgcgattctaaaacgtatcgatacgcattttcaaaatacatgtcgtttgataaatacgatggtataataactaaatgtcacgacgaaacaatgttactcaaactgtccactgttctagacactacactatatgcagttttaagatgtcataattcgagaaagttaagaagatacctcaacgagttaaaaaaatataataacgataagtcctttaaaatatattctaatattatgaatgagagataccttaatgtatattataaagatatgtacgtgtcaaaggtatatgataaactatttcctgttttcacagataaaaattgtctactaacattactaccttcagaaattatatacgaaatattatacatgctgacaattaacgatctttataatatatcgtatccacctaccaaagtatagttgtatttttctcatgcgatgtgtgtaaaaaaactgatattatataaatattttagtgccgtataataaagatgacgatgaaaatgatggtacatatatatttcgtatcattattgttattgctattccacagttacgccatagacatcgaaaatgaaatcacagaattcttcaataaaatgagagatactctaccagctaaagactctaaatggttgaatccagcatgtatgttcggaggcacaatgaatgatatagccgctctaggagagccattcagcgcaaagtgtcctcctattgaagacagtcttttatcgcacagatataaagactatgtggttaaatgggagaggctagaaaagaatagacggcgacaggtttctaataaacgtgttaaacatggtgatttatggatagccaactatacatctaaattcagtaaccgtaggtatttgtgcaccgtaactacaaagaatggtgactgtgttcagggtatagttagatctcatattaaaaaacctccttcatgcattccaaaaacatatgaactaggtactcatgataagtatggcatagacttatactgtggaattctttacgcaaaacattataataatataacttggtataaagataataaggaaattaatatcgacgacattaagtattcacaaacgggaaaggaattaattattcataatccagagttagaagatagcggaagatacgactgttacgttcattacgacgacgttagaatcaagaatgatatcgtagtatcaagatgtaaaatacttacggttataccgtcacaagaccacaggtttaaactaatactagatccgaaaatcaacgtaacgataggagaacctgccaatataacatgcactgctgtgtcaacgtcattattgatcgacgatgtactgattgaatgggaaaatccatccggatggcttataggattcgattttgatgtatactctgttttaactagtagaggcggtatcaccgaggcgaccttgtactttgaaaatgttactgaagaatatataggtaatacatataaatgtcgtggacacaactattattttgaaaaaacccttacaactacagtagtattggagtaaatatacaatgcatttttatatacattactgaattattattactgaattattattactgaattattattaattatatcgtatttgtgctatagaatggatgaagatacgcgactatctaggtatttgtatctcaccgatagagaacatataaatgtagactctattaaacagttgtgtaaaatatcagatcctaatgcatgttatagatgtggatgtacggctttacatgagtacttttataattatagatcagtcaacggaaaatacaagtatagatacaacggttactatcaatattattcatctagcgattatgaaaattataatgaatattattatgatagaactggtatgaacagtgagagtgataatatatcaatcaaaacagaatatgaattctatgatgaaacacaagatcaaagtacacaactagtaggttacgacattaaactcaaaaccaatgaggatgattttatggctatgatagatcagtgggtgtccatgattatatagatgaatcaattaataaagtagtatatggaagagagtctcacgtaagatggcgggatatatggcaagaacataatgatggcgtatacagtataggaaaggagtgcatagataatatatacgaagacaaccataccgtagacgaattctacaagatagacagcgtatcagatgtagatgacgcggaacacatatctccgataactaaaaaaccatagaatcagttgatgataatacctacatttctaatcttccgtataccatcaaatacaaaatattcgagcaacaataagtattttttatacctttaaaactgataaataaattttttctagtgatattttggcaagatgagaatcctatttctcatcgctttcatgtatgggtgtgttcactcatatgttaacgcggttgaaaccaaatgtccaaatctagacattgtaacatcttctggagaatttcattgttcaggatgtgtggaacatatgcctgagtttagctatatgtattggttggcaaaggatatgaaatcggacgaggataccaagtttatagaacatctgggtgatggcatcaaagaagatgaaaccgttcgtaccacagatagtggaatcgtcactctacgtaaagtccttcatgtgactgatactaataaatttgataattataggttcacttgtgtcctcgctacgctagatggcatttataaaaagaatgtttgctgaagtagttgtgtgctactatttttatttatgatataatctaatggaattaatttgaattgatatttatccaatactaaagattatattagaatcaaattaatcttttatacgagaaaaaataacgacatacgtcgtcaacaaattaaactttttatttattagttaactagcttatagaacttgctcattgttatgtttctaaaacgggtacggcatataggacaattatccgacgcaccggtttctcttcgtgttctatgccatatattgatgcatgttatgcaaaatatatgagtacacgaatccaataaaccaaagtatctatcgttttgagtaaacaacttcatagcaaattccacattctttttctttacttactctatacacgtcctcgtatttatttagtattttgatgatatccaactcagaaatggttgttgtattattgggtgtatttggagtataggtattattagctatgtaccaatttaccaaccctcttaatattgattgataatcacatcggttatccaattaataactaaattgtagtgtatatatagaccatatatgtttctatttttttgacagttacgtatagtttcagtaagttttgattgttgtattcctgtatctctagataagttagtcatatagtcccttccggcgatacgttttttccaagcccgaaattgattagccaaatgtgtatttatttttgtgatattgatataatatttcggataatgcatactgttagtcttatatcatttggttcatctatgtattgtaatattgttacatgatctatagatgatgtattgattttggcaggatcgaattccatatccgcgactaaacagtgaaaaaaatgtaaatactttttaaattttaaattagtaaaacttttttttattttttatgattccaaaaatactgaatacaaagtcctaaattataaatatggagatcatactaccacaacttattattatgtatacaaggccggtgtaatagatagatatatataattctattacaccggcagacaattaccgaccggtatttgtcgttaccaacataccgtataatatgtaatatacaattccataacccattgacagttgttatacatcaaaattgcaattcttttgattacgatgttataagaatgtagttaattgatgtatgatgttaatgtgtcctctttcctcttataacatcgtaatcaaaaacttttttataatatatacctaataatgtgtcttaatagttctcgtgattcgtcaaacaatcattcttataaaatataataaagcaacgtaaaaacacataaaaataagcgtaactaataagacaatggatatttacgacgataaaggtctacagactattaaactgtttaataatgaatttgattgtataaggaatgacatcagagaattatttaaacatgtaactgattccgatagtatacaacttccgatggaagacaattctgatattatagaaaatatcagaaaaatactatatagacgattaaaaaatgtagaatgtgttgacatcgataacacaataacttttatgaaatacgatccaaatgatgataataagcgtacgtgttctaattgggtacccttaactaataactatatggaatattgtctagtaatatatttggaaacaccgatatgtggaggcaaaataaaattataccaccctacaggaaatataaagtcggataaggatattatgtttgcaaagactctagactttaaatcaacgaaagtgttaactggacgtaaaacaattgccgttctagacatatccgtttcatataatagatcaatgactactattcactacaacgacgacgttgatatagatatacatactgataaaaatggaaaagagttatgttattgttatataacaatagatgatcattacttggttgatgtggaaactataggagttatagtcaatagatctggaaaatgtctgttagtaaataaccatctaggtataggtatcgttaaagataaacgtataagcgatagttttggagatgtatgtatggatacaatatttgacttttctgaagcacgagagttattttcattaactaatgatgataacaggaatatagcatgggacactgataaactagacgatgatacagatatatggactcccgtcacagaagatgattacaaatttctttctagactagtattgtatgcaaaatctcaatcggatactgtatttgactattatgttcttactggtgatacggaaccacccactgtattcattttcaaggtaactagattttactttaatatgccgaaataaaaaatttttgtataatatctagaggtagaggtattgtttagataaatacaaataacatagatacatcgcatacttagcatttttataaatatacataagacatacactttatacatttttgtaaaaatactcataaaaaaatttataaaaattatggcacaaccatatcttgtataggtagtttagttcgtcgagtgaacctataaacagataatagacaacacataataatgcctactaatacaagcataataccgggagatgggatatatgacgttgtagtgtttgggttttctgaacgttgatagtctactaatactacatgctgacatctaatgcctgtataaccatgagagcatctacaatacataccgtcaatatctctagcgtggatacagtcaccgtgtaaacaatatccatctccctctggaccgcataatctgatagctggaatatctgttgtagcgtttgtaatttctggcaatgtcgtttcgatagcgttaccactatcggcgaatgatctgattatcatagcagcgaacaacaacatcagataatttatcaacatttttgatggattctgtgtttatgctgtttctcagtgtgtgtttatgacaagattgggaattttatattattaattcagtaatataaactaataatatattgttaattgtgtaaataatataaaaataacaatacaatattgaatgtgttgctgttaaaaatgtatgtgttaatataatagaataaaataaatgagtatgatcattttagataacgattgattttatcattaccgcttcattcttatattctttgcttacggaacctatatttagaaacatctactaacaattttttatgcttgcattattaatggtatgtaatatgattgattgtgtacgcaataccaatttgttaagtatgaatacggggtacaaacataaattgaaatttaacattatttatttatgatatatatcgttatcgttaggtctataccatggatatctttaaagaactaatcttaaaacaccctgatgaaaatgttttgatttctccagtttccattttatctactttatctattctaaatcatggagcagctggttctacagctgaacaactatcaaaatatatagagaatatgaatgagaatacacccgatgacaataatgatgacatggaggtagatattccgtattgtgcgacactagctaccgcaaataaaatatacggtagcgatagtatcgagttccacgcctccttcctacaaaaaataaaagacgattttcaaactgtaaactttaataatgctaaccaaacaaaggaactaatcaacgaatgggttaagacaatgacaaatggtaaaattaattccttattgactagtccgctatccattaatactcgtatgacagttgttagcgccgtccattttaaagcaatgtggaaatatccattttctaaacatcttacatatacagacaagttttatatttctaagaatatagttaccagcgttgatatgatggtgggtaccgagaataacttgcaatatgtacatattaatgaattattcggaggattctctattatcgatattccatacgagggaaactctagtatggtaattatactaccggacgacatagaaggtatatataacatagaaaaaaatataacagatgaaaaatttaaaaaatggtgtggtatgttatctactaaaagtatagacttgtatatgccaaagtttaaagtggaaatgacagaaccgtataatctggtaccgattttagaaaatttaggacttactaatatattcggatattatgcagattttagcaagatgtgtaatgaaactatcactgtagaaaaatttctacatacgacgtttatagatgttaatgaggagtatacagaagcatcggccgttacaggagtatttacgattaacttttcgatggtatatcgtacgaaggtctacataaaccatccattcatgtacatgattaaagacaccacaggacgtatactttttatagggaaatactgctatccgcaataaatataaacaaatagacttttataaagagtcttcaacgataagtatatcgacatactacttatgctgcgaaagattctgaacgagaacgactatctcaccctcttggatcatatccgcactgctaaatactaaatctccactacactttttatcatcttatgaggaatgattgccttcgtgaaataggaataattagcaccagaatagctatggattattgtggtagagagtgcactattctatgtcgtctactggatgaagatgtgacgtacaaaaaaataaaactagaaattgaaacgtgtcacaacttatcaaaacatatagatagacgaggaaacaatgcgctacattgttacgtctccaataaatgcgatacagacattaagattgttctctcgcggagtcgagagactttgtagaaacaacgaaggattaactccgctaggagtatacagtaagcatagatacgtaaaatctcagattgtgcatctactgatatccagctattcaaattcctctaacgaactcaagtcgaatataaatgatttcgatctgtattcggataatatcgacttacgtctgctaaaatacctaattgtggataaacggatacgtccgtccaagaatacgaattatgcaatcaatggtctcggattggtggatatatacgtaacgacgcctaatccgagaccagaagtattgctatggcttcttaaatcagaatgttacagcaccggttacgtatttcgtacctgtatgtacgacagtgatatgtgtaagaactctcttcattactatatatcgtctcatagagaatctcaatctctatccaaggatgtaattaaatgtttgatcgataacaatgtttccatccatggcagagacgaaggaggatctttacccatccaatactactggtctttctcaaccatagatatagagattgttaaattattattaataaaggatgtggacacgtgtagagtatacgacgtcagccctatattagaggcgtattatctaaacaagcgatttagagtaaccccatataatgtagacatggaaatcgttaatcttcttattgagagacgtcatactcttgtcgacgtaatgcgtagtattacttcgtacgattccagagaatataaccactacatcatcgataacattctaaagagatttagacaacaggatgaatccatcgtacaagccatactgataaactacttacattacggcgatatggtcgttcgatgcatgttagataacggacaacaactatcctctacacgactactttgttaataataatctcgtcgatgtaaacgtcgtaaggtttatcgtggaaaatatggacacgcggctgtaaatcacgtatcgaacaatggccgtctatgtatgtacggtctgatattatcgagatttaataattgcgggtatcactgttatgaaaccatactgatagatgtatttgatatactaagcaagtacatggatgatatagatatgatcgataactctactatattacgcggtcgatgtcaataatatacaatttgcaaagcggttattggaatatggagcgagtatcacgctcgataatcaatacggccatccagaaaagcagttacagaagagaaaacaaaacgaaatcgttgttctacaagatgtctctccctacgacgattactacgtaaaaaagatactagcctactgcctattaagggacgagtcattcgcggaactacatagtaaattctgtttaaacgaggactataaaagtgtatttatgaaaaatatatcattcgataagatagattccatcatcgtgacataagtcgcctcaaagagattcgaatctccgacaccgacctgtatacggtatcacagctatcttaaagccatacattcagacagtcacatttcatttcccatgtacgacgatctcatagaacagtgccatctatcgatggagcgtaaaagtaaactcgtcgacaaagcactcaataaattagagtctaccatcggtcaatctagactatcgtatttgcctccggaaattatgcgcaatatcatctaaacagtatgttgtacggaaagaaccattacaaatattatccatgatagaaagaaaatatctatatgattggagaagtaggaaacaggaacaagacaacgattactacattattaaatcatgaagtccgtattatactcgtatatattgtttctctcatgtataataataaacggaagagatatagcaccgcatgcaccatccgatggaaagtgtaaagacaacgaatacaaacgccataatttgtgtccgggaacatacgcttccagattatgcgatagcaagactaacacacgatgtacgccgtgtggttcgggtaccttcacatctcgcaataatcatttacccgcttgtctaagttgtaacggaagacgcgatcgtgtaacacgactcacaatagaatctgtgaatgctctcccggatattattgtcttctcaaaggatcatccggatgcaaggcatgtgtttcccaaacaaaatgtggaataggatacggagtatccggagacgtcatctgttctccgtgtggtctcggaacatattctcacaccgtctcttccgcagataaatgcgaacccgtacccagaaatacgtttaactatatcgatgtggaaattaacctgtatccagttaacgacacgtcgtgtactcggacgaccactaccggtctcagcgaatccatctcaacgtcggaactaactattactatgaatcataaagactgtaatcccgtatttcgtgatggatacttctccgttcttaataaggtagcgacttcaggtttctttacaggagaaaggtgtgcactctgaatttcgagattaaatgcaataacaaagattcttcctccaaacagttaacgaaagcaaagaatgatactatcatgccgcattcggagacagtaactctagtgggcgacatctatatactatatagtaataccaatactcaagactacgaaactgatacaatctcttatcatgtgggtaatgttctcgatgtcgatagccatatgcccggtagttgcgatatacataaactgatcactaattccaaacccacccactttttatagtaagtttttcacccataaataataaatacaataattaatttctcgtaaaagtagaaaatatattctaatttattgcacggtaaggaagtagaatcataaagaacagtactcaatcaatagcaattatgaaacaatatatcgtcctggcatgcatgtgcctggcggcagctgctatgcctgccagtcttcagcaatcatcctcatcctcctcctcgtgtacggaagaagaaaacaaacatcatatgggaatcgatgttattatcaaagtcacaaagcaagaccaaacaccgaccaatgataagatttgccaatccgtaacggaaattacagagtccgagtcagatccagatcccgaggtggaatcagaagatgattccacatcagtcgaggatgtagatcctcctaccacttattactccatcatcggtggaggtctgagaatgaactttggattcaccaaatgtcctcagattaaatccatctcagaatccgctgatggaaacacagtgaatgctagattgtccagcgtgtccccaggacaaggtaaggactctcccgcgatcactcatgaagaagctcttgctatgatcaaagactgtgaagtgtctatcgacatcagatgtagcgaagaagagaaagacagcgacatcaagacccatccagtactcgggtctaacatctctcataagaaagtgagttacgaagatatcatcggttcaacgatcgtcgatacaaaatgcgtcaagaatctagagtttagcgttcgtatcggagacatgtgcaaggaatcatctgaacttgaggtcaaggatggattcaagtatgtcgacggatcggcatctgaaggtgcaaccgatgatacttcactcatcgattcaacaaaactcaaagcgtgtgtctgaatcgataactctattcatctgaaattggatgagtagggttaatcgaacgattcaggcacaccacgaattaaaaaagtgtaccggacactatattccggtttgcaaaacaaaaatgttcttaactacattcacaaaaagttacctctcgcgacttcttctttttctgtctcaatagtgtgatacgattatgacactattcctattcctattcctatttcctttcagagtatcacaaaaatattaaacctctttctgatggtctcataaaaaaagttttacaaaaatatttttattctctttctctctttgatggtctcataaaaaaagttttacaaaaatatttttattctctttctctctttgatggtctcataaaaaaagttttacaaaaatatttttattctctttctctctttgatggtctcataaaaaaagttttacaaaaatatttttattctctttctctctttgatggtctcataaaaaaagttttacaaaaatatttttattctctttctctctttgatggtctcataaaaaaagttttacaaaaatatttttattctctttctctctttgatggtctcataaaaaaagttttacaaaaatatttttattctctttctctctttgatggtctcataaaaaaagttttacaaaaatatttttattctctttctctctttgatggtctcataaaaaaagttttacaaaaatatttttattctctttctctctttgatggtctcataaaaaaagttttacaaaaatatttttattctctttctctctttgatggtctcataaaaaaagttttacaaaaatatttttattctctttctctctttgatggtctcataaaaaaagttttacaaaaatatttttattctctttctctctttgatggtctcataaaaaagttttacaaaaatatttttattctctttctctctttgatggtctcataaaaaagttttacaaaaatatttttattctctttctctctttgatggtctcataaaaaaagttttacaaaaatatttttattctctttctctctttgatggtctcataa

(The sequence listing continues in the following parts.)
